United States Patent Application Publication US 2020/0040061 A1 - sequence listing, part 6

SEQ ID NO: 77615 - DNA, 20 bp, Artificial Sequence
  Description of Artificial Sequence: Synthetic oligonucleotide
  Target: SCNA; (+) strand; PAM type: YTN; PAM sequence: TTT
tacttgtgaccttcagtacc

SEQ ID NO: 77616 - DNA, 20 bp, Artificial Sequence
  Description of Artificial Sequence: Synthetic oligonucleotide
  Target: SCNA; (+) strand; PAM type: YTN; PAM sequence: TTT
acttgtgaccttcagtacca

SEQ ID NO: 77617 - DNA, 20 bp, Artificial Sequence
  Description of Artificial Sequence: Synthetic oligonucleotide
  Target: SCNA; (+) strand; PAM type: YTN; PAM sequence: TTA
cttgtgaccttcagtaccaa

SEQ ID NO: 77618 - DNA, 20 bp, Artificial Sequence
  Description of Artificial Sequence: Synthetic oligonucleotide
  Target: SCNA; (+) strand; PAM type: YTN; PAM sequence: CTT
gtgaccttcagtaccaagta

SEQ ID NO: 77619 - DNA, 20 bp, Artificial Sequence
  Description of Artificial Sequence: Synthetic oligonucleotide
  Target: SCNA; (+) strand; PAM type: YTN; PAM sequence: TTG
tgaccttcagtaccaagtaa

SEQ ID NO: 77620 - DNA, 20 bp, Artificial Sequence
  Description of Artificial Sequence: Synthetic oligonucleotide
  Target: SCNA; (+) strand; PAM type: YTN; PAM sequence: CTT
cagtaccaagtaagactgga

SEQ ID NO: 77621 - DNA, 20 bp, Artificial Sequence
  Description of Artificial Sequence: Synthetic oligonucleotide
  Target: SCNA; (+) strand; PAM type: YTN; PAM sequence: TTC
agtaccaagtaagactggat

SEQ ID NO: 77622 - DNA, 20 bp, Artificial Sequence
  Description of Artificial Sequence: Synthetic oligonucleotide
  Target: SCNA; (+) strand; PAM type: YTN; PAM sequence: CTG
gatagaatatcaagataaat

SEQ ID NO: 77623 - DNA, 20 bp, Artificial Sequence
  Description of Artificial Sequence: Synthetic oligonucleotide
  Target: SCNA; (+) strand; PAM type: YTN; PAM sequence: TTT
gcgacagatttagtgtcctt

SEQ ID NO: 77624 - DNA, 20 bp, Artificial Sequence
  Description of Artificial Sequence: Synthetic oligonucleotide
  Target: SCNA; (+) strand; PAM type: YTN; PAM sequence: TTG
cgacagatttagtgtccttt

SEQ ID NO: 77625 - DNA, 20 bp, Artificial Sequence
  Description of Artificial Sequence: Synthetic oligonucleotide
  Target: SCNA; (+) strand; PAM type: YTN; PAM sequence: TTT
agtgtcctttctgtcgcatt

SEQ ID NO: 77626 - DNA, 20 bp, Artificial Sequence
  Description of Artificial Sequence: Synthetic oligonucleotide
  Target: SCNA; (+) strand; PAM type: YTN; PAM sequence: TTA
gtgtcctttctgtcgcatta

SEQ ID NO: 77627 - DNA, 20 bp, Artificial Sequence
  Description of Artificial Sequence: Synthetic oligonucleotide
  Target: SCNA; (+) strand; PAM type: YTN; PAM sequence: CTT
tctgtcgcattatcatggtt

SEQ ID NO: 77628 - DNA, 20 bp, Artificial Sequence
  Description of Artificial Sequence: Synthetic oligonucleotide
  Target: SCNA; (+) strand; PAM type: YTN; PAM sequence: TTT
ctgtcgcattatcatggttg

SEQ ID NO: 77629 - DNA, 20 bp, Artificial Sequence
  Description of Artificial Sequence: Synthetic oligonucleotide
  Target: SCNA; (+) strand; PAM type: YTN; PAM sequence: TTC
tgtcgcattatcatggttgc

SEQ ID NO: 77630 - DNA, 20 bp, Artificial Sequence
  Description of Artificial Sequence: Synthetic oligonucleotide
  Target: SCNA; (+) strand; PAM type: YTN; PAM sequence: CTG
tcgcattatcatggttgccc

SEQ ID NO: 77631 - DNA, 20 bp, Artificial Sequence
  Description of Artificial Sequence: Synthetic oligonucleotide
  Target: SCNA; (+) strand; PAM type: YTN; PAM sequence: TTA
tcatggttgcccagaagtta

SEQ ID NO: 77632 - DNA, 20 bp, Artificial Sequence
  Description of Artificial Sequence: Synthetic oligonucleotide
  Target: SCNA; (+) strand; PAM type: YTN; PAM sequence: TTG
cccagaagttaagaggtttg

SEQ ID NO: 77633 - DNA, 20 bp, Artificial Sequence
  Description of Artificial Sequence: Synthetic oligonucleotide
  Target: SCNA; (+) strand; PAM type: YTN; PAM sequence: TTA
agaggtttggaatgattcca

SEQ ID NO: 77634 - DNA, 20 bp, Artificial Sequence
  Description of Artificial Sequence: Synthetic oligonucleotide
  Target: SCNA; (+) strand; PAM type: YTN; PAM sequence: TTT
ggaatgattccagtctgata

SEQ ID NO: 77635 - DNA, 20 bp, Artificial Sequence
  Description of Artificial Sequence: Synthetic oligonucleotide
  Target: SCNA; (+) strand; PAM type: YTN; PAM sequence: TTG
gaatgattccagtctgataa

SEQ ID NO: 77636 - DNA, 20 bp, Artificial Sequence
  Description of Artificial Sequence: Synthetic oligonucleotide
  Target: SCNA; (+) strand; PAM type: YTN; PAM sequence: TTC
cagtctgataaggagaacaa

SEQ ID NO: 77637 - DNA, 20 bp, Artificial Sequence
  Description of Artificial Sequence: Synthetic oligonucleotide
  Target: SCNA; (+) strand; PAM type: YTN; PAM sequence: CTG
ataaggagaacaagacattg

SEQ ID NO: 77638 - DNA, 20 bp, Artificial Sequence
  Description of Artificial Sequence: Synthetic oligonucleotide
  Target: SCNA; (+) strand; PAM type: YTN; PAM sequence: TTG
aagtaagtgtctggagtcta

SEQ ID NO: 77639 - DNA, 20 bp, Artificial Sequence
  Description of Artificial Sequence: Synthetic oligonucleotide
  Target: SCNA; (+) strand; PAM type: YTN; PAM sequence: CTG
gagtctaaaatagatctggg

SEQ ID NO: 77640 - DNA, 20 bp, Artificial Sequence
  Description of Artificial Sequence: Synthetic oligonucleotide
  Target: SCNA; (+) strand; PAM type: YTN; PAM sequence: CTA
aaatagatctgggatagcta

SEQ ID NO: 77641 - DNA, 20 bp, Artificial Sequence
  Description of Artificial Sequence: Synthetic oligonucleotide
  Target: SCNA; (+) strand; PAM type: YTN; PAM sequence: CTG
ggatagctattactttagct

SEQ ID NO: 77642 - DNA, 20 bp, Artificial Sequence
  Description of Artificial Sequence: Synthetic oligonucleotide
  Target: SCNA; (+) strand; PAM type: YTN; PAM sequence: CTA
ttactttagcttttctgaga

SEQ ID NO: 77643 - DNA, 20 bp, Artificial Sequence
  Description of Artificial Sequence: Synthetic oligonucleotide
  Target: SCNA; (+) strand; PAM type: YTN; PAM sequence: TTA
ctttagcttttctgagattt

SEQ ID NO: 77644 - DNA, 20 bp, Artificial Sequence
  Description of Artificial Sequence: Synthetic oligonucleotide
  Target: SCNA; (+) strand; PAM type: YTN; PAM sequence: CTT
tagcttttctgagatttaat

SEQ ID NO: 77645 - DNA, 20 bp, Artificial Sequence
  Description of Artificial Sequence: Synthetic oligonucleotide
  Target: SCNA; (+) strand; PAM type: YTN; PAM sequence: TTT
agcttttctgagatttaata

SEQ ID NO: 77646 - DNA, 20 bp, Artificial Sequence
  Description of Artificial Sequence: Synthetic oligonucleotide
  Target: SCNA; (+) strand; PAM type: YTN; PAM sequence: TTA
gcttttctgagatttaatat

SEQ ID NO: 77647 - DNA, 20 bp, Artificial Sequence
  Description of Artificial Sequence: Synthetic oligonucleotide
  Target: SCNA; (+) strand; PAM type: YTN; PAM sequence: CTT
ttctgagatttaatatggga

SEQ ID NO: 77648 - DNA, 20 bp, Artificial Sequence
  Description of Artificial Sequence: Synthetic oligonucleotide
  Target: SCNA; (+) strand; PAM type: YTN; PAM sequence: TTT
tctgagatttaatatgggaa

SEQ ID NO: 77649 - DNA, 20 bp, Artificial Sequence
  Description of Artificial Sequence: Synthetic oligonucleotide
  Target: SCNA; (+) strand; PAM type: YTN; PAM sequence: TTT
ctgagatttaatatgggaat

SEQ ID NO: 77650 - DNA, 20 bp, Artificial Sequence
  Description of Artificial Sequence: Synthetic oligonucleotide
  Target: SCNA; (+) strand; PAM type: YTN; PAM sequence: TTC
tgagatttaatatgggaatg

SEQ ID NO: 77651 - DNA, 20 bp, Artificial Sequence
  Description of Artificial Sequence: Synthetic oligonucleotide
  Target: SCNA; (+) strand; PAM type: YTN; PAM sequence: CTG
agatttaatatgggaatgag

SEQ ID NO: 77652 - DNA, 20 bp, Artificial Sequence
  Description of Artificial Sequence: Synthetic oligonucleotide
  Target: SCNA; (+) strand; PAM type: YTN; PAM sequence: TTT
aatatgggaatgaggtgtaa

SEQ ID NO: 77653 - DNA, 20 bp, Artificial Sequence
  Description of Artificial Sequence: Synthetic oligonucleotide
  Target: SCNA; (+) strand; PAM type: YTN; PAM sequence: TTA
atatgggaatgaggtgtaaa

SEQ ID NO: 77654 - DNA, 20 bp, Artificial Sequence
  Description of Artificial Sequence: Synthetic oligonucleotide
  Target: SCNA; (+) strand; PAM type: YTN; PAM sequence: TTG
aaataactattacacagaga

SEQ ID NO: 77655 - DNA, 20 bp, Artificial Sequence
  Description of Artificial Sequence: Synthetic oligonucleotide
  Target: SCNA; (+) strand; PAM type: YTN; PAM sequence: CTA
ttacacagagatgcttgttc

SEQ ID NO: 77656 - DNA, 20 bp, Artificial Sequence
  Description of Artificial Sequence: Synthetic oligonucleotide
  Target: SCNA; (+) strand; PAM type: YTN; PAM sequence: TTA
cacagagatgcttgttcctt

SEQ ID NO: 77657 - DNA, 20 bp, Artificial Sequence
  Description of Artificial Sequence: Synthetic oligonucleotide
  Target: SCNA; (+) strand; PAM type: YTN; PAM sequence: CTT
gttccttcttcctaaggcct

SEQ ID NO: 77658 - DNA, 20 bp, Artificial Sequence
  Description of Artificial Sequence: Synthetic oligonucleotide
  Target: SCNA; (+) strand; PAM type: YTN; PAM sequence: TTG
ttccttcttcctaaggccta

SEQ ID NO: 77659 - DNA, 20 bp, Artificial Sequence
  Description of Artificial Sequence: Synthetic oligonucleotide
  Target: SCNA; (+) strand; PAM type: YTN; PAM sequence: TTC
cttcttcctaaggcctaaga

SEQ ID NO: 77660 - DNA, 20 bp, Artificial Sequence
  Description of Artificial Sequence: Synthetic oligonucleotide
  Target: SCNA; (+) strand; PAM type: YTN; PAM sequence: CTT
cttcctaaggcctaagaaca

SEQ ID NO: 77661 - DNA, 20 bp, Artificial Sequence
  Description of Artificial Sequence: Synthetic oligonucleotide
  Target: SCNA; (+) strand; PAM type: YTN; PAM sequence: TTC
ttcctaaggcctaagaacat

SEQ ID NO: 77662 - DNA, 20 bp, Artificial Sequence
  Description of Artificial Sequence: Synthetic oligonucleotide
  Target: SCNA; (+) strand; PAM type: YTN; PAM sequence: CTT
cctaaggcctaagaacattt

SEQ ID NO: 77663 - DNA, 20 bp, Artificial Sequence
  Description of Artificial Sequence: Synthetic oligonucleotide
  Target: SCNA; (+) strand; PAM type: YTN; PAM sequence: TTC
ctaaggcctaagaacatttc

SEQ ID NO: 77664 - DNA, 20 bp, Artificial Sequence
  Description of Artificial Sequence: Synthetic oligonucleotide
  Target: SCNA; (+) strand; PAM type: YTN; PAM sequence: CTA
aggcctaagaacatttctca

SEQ ID NO: 77665 - DNA, 20 bp, Artificial Sequence
  Description of Artificial Sequence: Synthetic oligonucleotide
  Target: SCNA; (+) strand; PAM type: YTN; PAM sequence: CTA
agaacatttctcactcattc

SEQ ID NO: 77666 - DNA, 20 bp, Artificial Sequence
  Description of Artificial Sequence: Synthetic oligonucleotide
  Target: SCNA; (+) strand; PAM type: YTN; PAM sequence: TTT
ctcactcattcttctatcct

SEQ ID NO: 77667 - DNA, 20 bp, Artificial Sequence
  Description of Artificial Sequence: Synthetic oligonucleotide
  Target: SCNA; (+) strand; PAM type: YTN; PAM sequence: TTC
tcactcattcttctatccta

SEQ ID NO: 77668 - DNA, 20 bp, Artificial Sequence
  Description of Artificial Sequence: Synthetic oligonucleotide
  Target: SCNA; (+) strand; PAM type: YTN; PAM sequence: CTC
actcattcttctatcctaga

SEQ ID NO: 77669 - DNA, 20 bp, Artificial Sequence
  Description of Artificial Sequence: Synthetic oligonucleotide
  Target: SCNA; (+) strand; PAM type: YTN; PAM sequence: CTC
attcttctatcctagaattc

SEQ ID NO: 77670 - DNA, 20 bp, Artificial Sequence
  Description of Artificial Sequence: Synthetic oligonucleotide
  Target: SCNA; (+) strand; PAM type: YTN; PAM sequence: TTC
ttctatcctagaattcataa

SEQ ID NO: 77671 - DNA, 20 bp, Artificial Sequence
  Description of Artificial Sequence: Synthetic oligonucleotide
  Target: SCNA; (+) strand; PAM type: YTN; PAM sequence: CTT
ctatcctagaattcataatg

SEQ ID NO: 77672 - DNA, 20 bp, Artificial Sequence
  Description of Artificial Sequence: Synthetic oligonucleotide
  Target: SCNA; (+) strand; PAM type: YTN; PAM sequence: TTC
tatcctagaattcataatgg

SEQ ID NO: 77673 - DNA, 20 bp, Artificial Sequence
  Description of Artificial Sequence: Synthetic oligonucleotide
  Target: SCNA; (+) strand; PAM type: YTN; PAM sequence: CTA
tcctagaattcataatggta

SEQ ID NO: 77674 - DNA, 20 bp, Artificial Sequence
  Description of Artificial Sequence: Synthetic oligonucleotide
  Target: SCNA; (+) strand; PAM type: YTN; PAM sequence: CTA
gaattcataatggtatatgg

SEQ ID NO: 77675 - DNA, 20 bp, Artificial Sequence
  Description of Artificial Sequence: Synthetic oligonucleotide
  Target: SCNA; (+) strand; PAM type: YTN; PAM sequence: TTC
ataatggtatatggcactgc

SEQ ID NO: 77676 - DNA, 20 bp, Artificial Sequence
  Description of Artificial Sequence: Synthetic oligonucleotide
  Target: SCNA; (+) strand; PAM type: YTN; PAM sequence: CTG
cacagaaattcattaaatgt

SEQ ID NO: 77677 - DNA, 20 bp, Artificial Sequence
  Description of Artificial Sequence: Synthetic oligonucleotide
  Target: SCNA; (+) strand; PAM type: YTN; PAM sequence: TTC
attaaatgttagtgaaatat

SEQ ID NO: 77678 - DNA, 20 bp, Artificial Sequence
  Description of Artificial Sequence: Synthetic oligonucleotide
  Target: SCNA; (+) strand; PAM type: YTN; PAM sequence: TTA
aatgttagtgaaatattaca

SEQ ID NO: 77679 - DNA, 20 bp, Artificial Sequence
  Description of Artificial Sequence: Synthetic oligonucleotide
  Target: SCNA; (+) strand; PAM type: YTN; PAM sequence: TTA
gtgaaatattacatgtgaaa

SEQ ID NO: 77680 - DNA, 20 bp, Artificial Sequence
  Description of Artificial Sequence: Synthetic oligonucleotide
  Target: SCNA; (+) strand; PAM type: YTN; PAM sequence: TTA
catgtgaaagaaggtagtaa

SEQ ID NO: 77681 - DNA, 20 bp, Artificial Sequence
  Description of Artificial Sequence: Synthetic oligonucleotide
  Target: SCNA; (+) strand; PAM type: YTN; PAM sequence: CTA
atataattttttatgggctc

SEQ ID NO: 77682 - DNA, 20 bp, Artificial Sequence
  Description of Artificial Sequence: Synthetic oligonucleotide
  Target: SCNA; (+) strand; PAM type: YTN; PAM sequence: TTT
tttatgggctcatttatgtt

SEQ ID NO: 77683 - DNA, 20 bp, Artificial Sequence
  Description of Artificial Sequence: Synthetic oligonucleotide
  Target: SCNA; (+) strand; PAM type: YTN; PAM sequence: TTT
ttatgggctcatttatgttc

SEQ ID NO: 77684 - DNA, 20 bp, Artificial Sequence
  Description of Artificial Sequence: Synthetic oligonucleotide
  Target: SCNA; (+) strand; PAM type: YTN; PAM sequence: TTT
tatgggctcatttatgttct

SEQ ID NO: 77685 - DNA, 20 bp, Artificial Sequence
  Description of Artificial Sequence: Synthetic oligonucleotide
  Target: SCNA; (+) strand; PAM type: YTN; PAM sequence: TTT
atgggctcatttatgttctg

SEQ ID NO: 77686 - DNA, 20 bp, Artificial Sequence
  Description of Artificial Sequence: Synthetic oligonucleotide
  Target: SCNA; (+) strand; PAM type: YTN; PAM sequence: TTA
tgggctcatttatgttctgc

SEQ ID NO: 77687 - DNA, 20 bp, Artificial Sequence
  Description of Artificial Sequence: Synthetic oligonucleotide
  Target: SCNA; (+) strand; PAM type: YTN; PAM sequence: CTC
atttatgttctgcattttct

SEQ ID NO: 77688 - DNA, 20 bp, Artificial Sequence
  Description of Artificial Sequence: Synthetic oligonucleotide
  Target: SCNA; (+) strand; PAM type: YTN; PAM sequence: TTT
atgttctgcattttcttata

SEQ ID NO: 77689 - DNA, 20 bp, Artificial Sequence
  Description of Artificial Sequence: Synthetic oligonucleotide
  Target: SCNA; (+) strand; PAM type: YTN; PAM sequence: TTA
tgttctgcattttcttataa

SEQ ID NO: 77690 - DNA, 20 bp, Artificial Sequence
  Description of Artificial Sequence: Synthetic oligonucleotide
  Target: SCNA; (+) strand; PAM type: YTN; PAM sequence: TTC
tgcattttcttataaaatta

SEQ ID NO: 77691 - DNA, 20 bp, Artificial Sequence
  Description of Artificial Sequence: Synthetic oligonucleotide
  Target: SCNA; (+) strand; PAM type: YTN; PAM sequence: CTG
cattttcttataaaattact

SEQ ID NO: 77692 - DNA, 20 bp, Artificial Sequence
  Description of Artificial Sequence: Synthetic oligonucleotide
  Target: SCNA; (+) strand; PAM type: YTN; PAM sequence: TTT
tcttataaaattacttttta

SEQ ID NO: 77693 - DNA, 20 bp, Artificial Sequence
  Description of Artificial Sequence: Synthetic oligonucleotide
  Target: SCNA; (+) strand; PAM type: YTN; PAM sequence: TTT
cttataaaattactttttag

SEQ ID NO: 77694 - DNA, 20 bp, Artificial Sequence
  Description of Artificial Sequence: Synthetic oligonucleotide
  Target: SCNA; (+) strand; PAM type: YTN; PAM sequence: TTC
ttataaaattactttttaga

SEQ ID NO: 77695 - DNA, 20 bp, Artificial Sequence
  Description of Artificial Sequence: Synthetic oligonucleotide
  Target: SCNA; (+) strand; PAM type: YTN; PAM sequence: CTT
ataaaattactttttagatt

SEQ ID NO: 77696 - DNA, 20 bp, Artificial Sequence
  Description of Artificial Sequence: Synthetic oligonucleotide
  Target: SCNA; (+) strand; PAM type: YTN; PAM sequence: TTA
taaaattactttttagattg

SEQ ID NO: 77697 - DNA, 20 bp, Artificial Sequence
  Description of Artificial Sequence: Synthetic oligonucleotide
  Target: SCNA; (+) strand; PAM type: YTN; PAM sequence: TTA
ctttttagattgttttgctg

SEQ ID NO: 77698 - DNA, 20 bp, Artificial Sequence
  Description of Artificial Sequence: Synthetic oligonucleotide
  Target: SCNA; (+) strand; PAM type: YTN; PAM sequence: CTT
tttagattgttttgctgctc

SEQ ID NO: 77699 - DNA, 20 bp, Artificial Sequence
  Description of Artificial Sequence: Synthetic oligonucleotide
  Target: SCNA; (+) strand; PAM type: YTN; PAM sequence: TTT
ttagattgttttgctgctcg

SEQ ID NO: 77700 - DNA, 20 bp, Artificial Sequence
  Description of Artificial Sequence: Synthetic oligonucleotide
  Target: SCNA; (+) strand; PAM type: YTN; PAM sequence: TTT
tagattgttttgctgctcga

SEQ ID NO: 77701 - DNA, 20 bp, Artificial Sequence
  Description of Artificial Sequence: Synthetic oligonucleotide
  Target: SCNA; (+) strand; PAM type: YTN; PAM sequence: TTT
agattgttttgctgctcgaa

SEQ ID NO: 77702 - DNA, 20 bp, Artificial Sequence
  Description of Artificial Sequence: Synthetic oligonucleotide
  Target: SCNA; (+) strand; PAM type: YTN; PAM sequence: TTA
gattgttttgctgctcgaat

SEQ ID NO: 77703 - DNA, 20 bp, Artificial Sequence
  Description of Artificial Sequence: Synthetic oligonucleotide
  Target: SCNA; (+) strand; PAM type: YTN; PAM sequence: TTG
ttttgctgctcgaatcatta

SEQ ID NO: 77704 - DNA, 20 bp, Artificial Sequence
  Description of Artificial Sequence: Synthetic oligonucleotide
  Target: SCNA; (+) strand; PAM type: YTN; PAM sequence: TTT
tgctgctcgaatcattactg

SEQ ID NO: 77705 - DNA, 20 bp, Artificial Sequence
  Description of Artificial Sequence: Synthetic oligonucleotide
  Target: SCNA; (+) strand; PAM type: YTN; PAM sequence: TTT
gctgctcgaatcattactgg

SEQ ID NO: 77706 - DNA, 20 bp, Artificial Sequence
  Description of Artificial Sequence: Synthetic oligonucleotide
  Target: SCNA; (+) strand; PAM type: YTN; PAM sequence: TTG
ctgctcgaatcattactggt

SEQ ID NO: 77707 - DNA, 20 bp, Artificial Sequence
  Description of Artificial Sequence: Synthetic oligonucleotide
  Target: SCNA; (+) strand; PAM type: YTN; PAM sequence: CTG
ctcgaatcattactggttgc

SEQ ID NO: 77708 - DNA, 20 bp, Artificial Sequence
  Description of Artificial Sequence: Synthetic oligonucleotide
  Target: SCNA; (+) strand; PAM type: YTN; PAM sequence: CTC
gaatcattactggttgctat

SEQ ID NO: 77709 - DNA, 20 bp, Artificial Sequence
  Description of Artificial Sequence: Synthetic oligonucleotide
  Target: SCNA; (+) strand; PAM type: YTN; PAM sequence: TTA
ctggttgctatctagggatc

SEQ ID NO: 77710 - DNA, 20 bp, Artificial Sequence
  Description of Artificial Sequence: Synthetic oligonucleotide
  Target: SCNA; (+) strand; PAM type: YTN; PAM sequence: CTG
gttgctatctagggatcacc

SEQ ID NO: 77711 - DNA, 20 bp, Artificial Sequence
  Description of Artificial Sequence: Synthetic oligonucleotide
  Target: SCNA; (+) strand; PAM type: YTN; PAM sequence: TTG
ctatctagggatcaccttca

SEQ ID NO: 77712 - DNA, 20 bp, Artificial Sequence
  Description of Artificial Sequence: Synthetic oligonucleotide
  Target: SCNA; (+) strand; PAM type: YTN; PAM sequence: CTA
tctagggatcaccttcaaac

SEQ ID NO: 77713 - DNA, 20 bp, Artificial Sequence
  Description of Artificial Sequence: Synthetic oligonucleotide
  Target: SCNA; (+) strand; PAM type: YTN; PAM sequence: CTA
gggatcaccttcaaacccct

SEQ ID NO: 77714 - DNA, 20 bp, Artificial Sequence
  Description of Artificial Sequence: Synthetic oligonucleotide
  Target: SCNA; (+) strand; PAM type: YTN; PAM sequence: CTT
caaacccctttcaaaataca

SEQ ID NO: 77715 - DNA, 20 bp, Artificial Sequence
  Description of Artificial Sequence: Synthetic oligonucleotide
  Target: SCNA; (+) strand; PAM type: YTN; PAM sequence: TTC
aaacccctttcaaaatacaa

SEQ ID NO: 77716 - DNA, 20 bp, Artificial Sequence
  Description of Artificial Sequence: Synthetic oligonucleotide
  Target: SCNA; (+) strand; PAM type: YTN; PAM sequence: CTT
tcaaaatacaatgttcaaaa

SEQ ID NO: 77717 - DNA, 20 bp, Artificial Sequence
  Description of Artificial Sequence: Synthetic oligonucleotide
  Target: SCNA; (+) strand; PAM type: YTN; PAM sequence: TTT
caaaatacaatgttcaaaaa

SEQ ID NO: 77718 - DNA, 20 bp, Artificial Sequence
  Description of Artificial Sequence: Synthetic oligonucleotide
  Target: SCNA; (+) strand; PAM type: YTN; PAM sequence: TTC
aaaatacaatgttcaaaaaa

SEQ ID NO: 77719 - DNA, 20 bp, Artificial Sequence
  Description of Artificial Sequence: Synthetic oligonucleotide
  Target: SCNA; (+) strand; PAM type: YTN; PAM sequence: TTC
aaaaaaaataaaaacaaggg

SEQ ID NO: 77720 - DNA, 20 bp, Artificial Sequence
  Description of Artificial Sequence: Synthetic oligonucleotide
  Target: SCNA; (+) strand; PAM type: YTN; PAM sequence: CTG
gcacaatggctcacacctgt

SEQ ID NO: 77721 - DNA, 20 bp, Artificial Sequence
  Description of Artificial Sequence: Synthetic oligonucleotide
  Target: SCNA; (+) strand; PAM type: YTN; PAM sequence: CTC
acacctgtatcccagcactg

SEQ ID NO: 77722 - DNA, 20 bp, Artificial Sequence
  Description of Artificial Sequence: Synthetic oligonucleotide
  Target: SCNA; (+) strand; PAM type: YTN; PAM sequence: CTG
tatcccagcactgttgggag

SEQ ID NO: 77723 - DNA, 20 bp, Artificial Sequence
  Description of Artificial Sequence: Synthetic oligonucleotide
  Target: SCNA; (+) strand; PAM type: YTN; PAM sequence: CTG
ttgggaggccgaggcaggag

SEQ ID NO: 77724 - DNA, 20 bp, Artificial Sequence
  Description of Artificial Sequence: Synthetic oligonucleotide
  Target: SCNA; (+) strand; PAM type: YTN; PAM sequence: TTG
ggaggccgaggcaggagaat

SEQ ID NO: 77725 - DNA, 20 bp, Artificial Sequence
  Description of Artificial Sequence: Synthetic oligonucleotide
  Target: SCNA; (+) strand; PAM type: YTN; PAM sequence: TTG
cttgagcccaggagttcgag

SEQ ID NO: 77726 - DNA, 20 bp, Artificial Sequence
  Description of Artificial Sequence: Synthetic oligonucleotide
  Target: SCNA; (+) strand; PAM type: YTN; PAM sequence: CTT
gagcccaggagttcgaggcc

SEQ ID NO: 77727 - DNA, 20 bp, Artificial Sequence
  Description of Artificial Sequence: Synthetic oligonucleotide
  Target: SCNA; (+) strand; PAM type: YTN; PAM sequence: TTG
agcccaggagttcgaggcca

SEQ ID NO: 77728 - DNA, 20 bp, Artificial Sequence
  Description of Artificial Sequence: Synthetic oligonucleotide
  Target: SCNA; (+) strand; PAM type: YTN; PAM sequence: TTC
gaggccagcctgggcaacat

SEQ ID NO: 77729 - DNA, 20 bp, Artificial Sequence
  Description of Artificial Sequence: Synthetic oligonucleotide
  Target: SCNA; (+) strand; PAM type: YTN; PAM sequence: CTG
ggcaacatagagagacgcta

SEQ ID NO: 77730 - DNA, 20 bp, Artificial Sequence
  Description of Artificial Sequence: Synthetic oligonucleotide
  Target: SCNA; (+) strand; PAM type: YTN; PAM sequence: CTA
tctctataataaataaataa

SEQ ID NO: 77731 - DNA, 20 bp, Artificial Sequence
  Description of Artificial Sequence: Synthetic oligonucleotide
  Target: SCNA; (+) strand; PAM type: YTN; PAM sequence: CTC
tataataaataaataaataa

SEQ ID NO: 77732 - DNA, 20 bp, Artificial Sequence
  Description of Artificial Sequence: Synthetic oligonucleotide
  Target: SCNA; (+) strand; PAM type: YTN; PAM sequence: CTA
taataaataaataaataaat

SEQ ID NO: 77733 - DNA, 20 bp, Artificial Sequence
  Description of Artificial Sequence: Synthetic oligonucleotide
  Target: SCNA; (+) strand; PAM type: YTN; PAM sequence: TTT
ttggaaaaacaaatgctgtt

SEQ ID NO: 77734 - DNA, 20 bp, Artificial Sequence
  Description of Artificial Sequence: Synthetic oligonucleotide
  Target: SCNA; (+) strand; PAM type: YTN; PAM sequence: TTT
tggaaaaacaaatgctgtta

SEQ ID NO: 77735 - DNA, 20 bp, Artificial Sequence
  Description of Artificial Sequence: Synthetic oligonucleotide
  Target: SCNA; (+) strand; PAM type: YTN; PAM sequence: TTT
ggaaaaacaaatgctgttaa

SEQ ID NO: 77736 - DNA, 20 bp, Artificial Sequence
  Description of Artificial Sequence: Synthetic oligonucleotide
  Target: SCNA; (+) strand; PAM type: YTN; PAM sequence: TTG
gaaaaacaaatgctgttaaa

SEQ ID NO: 77737 - DNA, 20 bp, Artificial Sequence
  Description of Artificial Sequence: Synthetic oligonucleotide
  Target: SCNA; (+) strand; PAM type: YTN; PAM sequence: CTG
ttaaaatgcatttctagctt

SEQ ID NO: 77738 - DNA, 20 bp, Artificial Sequence
  Description of Artificial Sequence: Synthetic oligonucleotide
  Target: SCNA; (+) strand; PAM type: YTN; PAM sequence: TTA
aaatgcatttctagcttagg

SEQ ID NO: 77739 - DNA, 20 bp, Artificial Sequence
  Description of Artificial Sequence: Synthetic oligonucleotide
  Target: SCNA; (+) strand; PAM type: YTN; PAM sequence: TTT
ctagcttaggtcacataaag

SEQ ID NO: 77740 - DNA, 20 bp, Artificial Sequence
  Description of Artificial Sequence: Synthetic oligonucleotide
  Target: SCNA; (+) strand; PAM type: YTN; PAM sequence: TTC
tagcttaggtcacataaagg

SEQ ID NO: 77741 - DNA, 20 bp, Artificial Sequence
  Description of Artificial Sequence: Synthetic oligonucleotide
  Target: SCNA; (+) strand; PAM type: YTN; PAM sequence: CTA
gcttaggtcacataaaggat

SEQ ID NO: 77742 - DNA, 20 bp, Artificial Sequence
  Description of Artificial Sequence: Synthetic oligonucleotide
  Target: SCNA; (+) strand; PAM type: YTN; PAM sequence: CTT
aggtcacataaaggatctga

SEQ ID NO: 77743 - DNA, 20 bp, Artificial Sequence
  Description of Artificial Sequence: Synthetic oligonucleotide
  Target: SCNA; (+) strand; PAM type: YTN; PAM sequence: TTA
ggtcacataaaggatctgaa

SEQ ID NO: 77744 - DNA, 20 bp, Artificial Sequence
  Description of Artificial Sequence: Synthetic oligonucleotide
  Target: SCNA; (+) strand; PAM type: YTN; PAM sequence: CTG
aaatgggcatgtaaacaatg

SEQ ID NO: 77745 - DNA, 20 bp, Artificial Sequence
  Description of Artificial Sequence: Synthetic oligonucleotide
  Target: SCNA; (+) strand; PAM type: YTN; PAM sequence: TTT
ttatatatatcaattaacag

SEQ ID NO: 77746 - DNA, 20 bp, Artificial Sequence
  Description of Artificial Sequence: Synthetic oligonucleotide
  Target: SCNA; (+) strand; PAM type: YTN; PAM sequence: TTT
tatatatatcaattaacagg

SEQ ID NO: 77747 - DNA, 20 bp, Artificial Sequence
  Description of Artificial Sequence: Synthetic oligonucleotide
  Target: SCNA; (+) strand; PAM type: YTN; PAM sequence: TTT
atatatatcaattaacaggt

SEQ ID NO: 77748 - DNA, 20 bp, Artificial Sequence
  Description of Artificial Sequence: Synthetic oligonucleotide
  Target: SCNA; (+) strand; PAM type: YTN; PAM sequence: TTA
tatatatcaattaacaggtc

SEQ ID NO: 77749 - DNA, 20 bp, Artificial Sequence
  Description of Artificial Sequence: Synthetic oligonucleotide
  Target: SCNA; (+) strand; PAM type: YTN; PAM sequence: TTA
acaggtcttgaaaaaagtat

SEQ ID NO: 77750 - DNA, 20 bp, Artificial Sequence
  Description of Artificial Sequence: Synthetic oligonucleotide
  Target: SCNA; (+) strand; PAM type: YTN; PAM sequence: CTT
gaaaaaagtattgactctac

SEQ ID NO: 77751 - DNA, 20 bp, Artificial Sequence
  Description of Artificial Sequence: Synthetic oligonucleotide
  Target: SCNA; (+) strand; PAM type: YTN; PAM sequence: TTG
aaaaaagtattgactctact

SEQ ID NO: 77752 - DNA, 20 bp, Artificial Sequence
  Description of Artificial Sequence: Synthetic oligonucleotide
  Target: SCNA; (+) strand; PAM type: YTN; PAM sequence: TTG
actctactggcttgtgtgaa

SEQ ID NO: 77753 - DNA, 20 bp, Artificial Sequence
  Description of Artificial Sequence: Synthetic oligonucleotide
  Target: SCNA; (+) strand; PAM type: YTN; PAM sequence: CTC
tactggcttgtgtgaaattt

SEQ ID NO: 77754 - DNA, 20 bp, Artificial Sequence
  Description of Artificial Sequence: Synthetic oligonucleotide
  Target: SCNA; (+) strand; PAM type: YTN; PAM sequence: CTA
ctggcttgtgtgaaatttcc

SEQ ID NO: 77755 - DNA, 20 bp, Artificial Sequence
  Description of Artificial Sequence: Synthetic oligonucleotide
  Target: SCNA; (+) strand; PAM type: YTN; PAM sequence: CTG
gcttgtgtgaaatttccctg

SEQ ID NO: 77756 - DNA, 20 bp, Artificial Sequence
  Description of Artificial Sequence: Synthetic oligonucleotide
  Target: SCNA; (+) strand; PAM type: YTN; PAM sequence: CTT
gtgtgaaatttccctgaatg

SEQ ID NO: 77757 - DNA, 20 bp, Artificial Sequence
  Description of Artificial Sequence: Synthetic oligonucleotide
  Target: SCNA; (+) strand; PAM type: YTN; PAM sequence: TTG
tgtgaaatttccctgaatga

SEQ ID NO: 77758 - DNA, 20 bp, Artificial Sequence
  Description of Artificial Sequence: Synthetic oligonucleotide
  Target: SCNA; (+) strand; PAM type: YTN; PAM sequence: TTT
ccctgaatgaaatcagacaa

SEQ ID NO: 77759 - DNA, 20 bp, Artificial Sequence
  Description of Artificial Sequence: Synthetic oligonucleotide
  Target: SCNA; (+) strand; PAM type: YTN; PAM sequence: TTC
cctgaatgaaatcagacaat

SEQ ID NO: 77760 - DNA, 20 bp, Artificial Sequence
  Description of Artificial Sequence: Synthetic oligonucleotide
  Target: SCNA; (+) strand; PAM type: YTN; PAM sequence: CTG
aatgaaatcagacaatggtg

SEQ ID NO: 77761 - DNA, 20 bp, Artificial Sequence
  Description of Artificial Sequence: Synthetic oligonucleotide
  Target: SCNA; (+) strand; PAM type: YTN; PAM sequence: TTC
tcagaaacaatgcatcttag

SEQ ID NO: 77762 - DNA, 20 bp, Artificial Sequence
  Description of Artificial Sequence: Synthetic oligonucleotide
  Target: SCNA; (+) strand; PAM type: YTN; PAM sequence: CTC
agaaacaatgcatcttagaa

SEQ ID NO: 77763 - DNA, 20 bp, Artificial Sequence
  Description of Artificial Sequence: Synthetic oligonucleotide
  Target: SCNA; (+) strand; PAM type: YTN; PAM sequence: CTT
agaagagttaatatcagcca

SEQ ID NO: 77764 - DNA, 20 bp, Artificial Sequence
  Description of Artificial Sequence: Synthetic oligonucleotide
  Target: SCNA; (+) strand; PAM type: YTN; PAM sequence: TTA
gaagagttaatatcagccaa

SEQ ID NO: 77765 - DNA, 20 bp, Artificial Sequence
  Description of Artificial Sequence: Synthetic oligonucleotide
  Target: SCNA; (+) strand; PAM type: YTN; PAM sequence: TTA
atatcagccaaagacattat

SEQ ID NO: 77766 - DNA, 20 bp, Artificial Sequence
  Description of Artificial Sequence: Synthetic oligonucleotide
  Target: SCNA; (+) strand; PAM type: YTN; PAM sequence: TTA
tatcatactaacttctctcc

SEQ ID NO: 77767 - DNA, 20 bp, Artificial Sequence
  Description of Artificial Sequence: Synthetic oligonucleotide
  Target: SCNA; (+) strand; PAM type: YTN; PAM sequence: CTA
acttctctcccaataaaatg

SEQ ID NO: 77768 - DNA, 20 bp, Artificial Sequence
  Description of Artificial Sequence: Synthetic oligonucleotide
  Target: SCNA; (+) strand; PAM type: YTN; PAM sequence: CTT
ctctcccaataaaatgccta

SEQ ID NO: 77769 - DNA, 20 bp, Artificial Sequence
  Description of Artificial Sequence: Synthetic oligonucleotide
  Target: SCNA; (+) strand; PAM type: YTN; PAM sequence: TTC
tctcccaataaaatgcctag

SEQ ID NO: 77770 - DNA, 20 bp, Artificial Sequence
  Description of Artificial Sequence: Synthetic oligonucleotide
  Target: SCNA; (+) strand; PAM type: YTN; PAM sequence: CTC
tcccaataaaatgcctagaa

SEQ ID NO: 77771 - DNA, 20 bp, Artificial Sequence
  Description of Artificial Sequence: Synthetic oligonucleotide
  Target: SCNA; (+) strand; PAM type: YTN; PAM sequence: CTC
ccaataaaatgcctagaaaa

SEQ ID NO: 77772 - DNA, 20 bp, Artificial Sequence
  Description of Artificial Sequence: Synthetic oligonucleotide
  Target: SCNA; (+) strand; PAM type: YTN; PAM sequence: CTA
gaaaacaatgtatctctaac

SEQ ID NO: 77773 - DNA, 20 bp, Artificial Sequence
  Description of Artificial Sequence: Synthetic oligonucleotide
  Target: SCNA; (+) strand; PAM type: YTN; PAM sequence: CTC
taacaagaaaaagttcaatg

SEQ ID NO: 77774 - DNA, 20 bp, Artificial Sequence
  Description of Artificial Sequence: Synthetic oligonucleotide
  Target: SCNA; (+) strand; PAM type: YTN; PAM sequence: CTA
acaagaaaaagttcaatgct

SEQ ID NO: 77775 - DNA, 20 bp, Artificial Sequence
  Description of Artificial Sequence: Synthetic oligonucleotide
  Target: SCNA; (+) strand; PAM type: YTN; PAM sequence: TTC
aatgctgtgttaactggcaa

SEQ ID NO: 77776 - DNA, 20 bp, Artificial Sequence
  Description of Artificial Sequence: Synthetic oligonucleotide
  Target: SCNA; (+) strand; PAM type: YTN; PAM sequence: CTG
tgttaactggcaattccatt

SEQ ID NO: 77777 - DNA, 20 bp, Artificial Sequence
  Description of Artificial Sequence: Synthetic oligonucleotide
  Target: SCNA; (+) strand; PAM type: YTN; PAM sequence: TTA
actggcaattccatttaaaa

SEQ ID NO: 77778 - DNA, 20 bp, Artificial Sequence
  Description of Artificial Sequence: Synthetic oligonucleotide
  Target: SCNA; (+) strand; PAM type: YTN; PAM sequence: CTG
gcaattccatttaaaatatt

SEQ ID NO: 77779 - DNA, 20 bp, Artificial Sequence
  Description of Artificial Sequence: Synthetic oligonucleotide
  Target: SCNA; (+) strand; PAM type: YTN; PAM sequence: TTC
catttaaaatattttcaaac

SEQ ID NO: 77780 - DNA, 20 bp, Artificial Sequence
  Description of Artificial Sequence: Synthetic oligonucleotide
  Target: SCNA; (+) strand; PAM type: YTN; PAM sequence: TTT
aaaatattttcaaacacatt

SEQ ID NO: 77781 - DNA, 20 bp, Artificial Sequence
  Description of Artificial Sequence: Synthetic oligonucleotide
  Target: SCNA; (+) strand; PAM type: YTN; PAM sequence: TTA
aaatattttcaaacacattc

SEQ ID NO: 77782 - DNA, 20 bp, Artificial Sequence
  Description of Artificial Sequence: Synthetic oligonucleotide
  Target: SCNA; (+) strand; PAM type: YTN; PAM sequence: TTT
tcaaacacattccctaaggt

SEQ ID NO: 77783 - DNA, 20 bp, Artificial Sequence
  Description of Artificial Sequence: Synthetic oligonucleotide
  Target: SCNA; (+) strand; PAM type: YTN; PAM sequence: TTT
caaacacattccctaaggta

SEQ ID NO: 77784 - DNA, 20 bp, Artificial Sequence
  Description of Artificial Sequence: Synthetic oligonucleotide
  Target: SCNA; (+) strand; PAM type: YTN; PAM sequence: TTC
aaacacattccctaaggtaa

SEQ ID NO: 77785 - DNA, 20 bp, Artificial Sequence
  Description of Artificial Sequence: Synthetic oligonucleotide
  Target: SCNA; (+) strand; PAM type: YTN; PAM sequence: TTC
cctaaggtaacaaatataat

SEQ ID NO: 77786 - DNA, 20 bp, Artificial Sequence
  Description of Artificial Sequence: Synthetic oligonucleotide
  Target: SCNA; (+) strand; PAM type: YTN; PAM sequence: CTA
aggtaacaaatataattatt

SEQ ID NO: 77787 - DNA, 20 bp, Artificial Sequence
  Description of Artificial Sequence: Synthetic oligonucleotide
  Target: SCNA; (+) strand; PAM type: YTN; PAM sequence: TTA
ttaaaagcctaataaatctt

SEQ ID NO: 77788 - DNA, 20 bp, Artificial Sequence
  Description of Artificial Sequence: Synthetic oligonucleotide
  Target: SCNA; (+) strand; PAM type: YTN; PAM sequence: TTA
aaagcctaataaatctttta

SEQ ID NO: 77789 - DNA, 20 bp, Artificial Sequence
  Description of Artificial Sequence: Synthetic oligonucleotide
  Target: SCNA; (+) strand; PAM type: YTN; PAM sequence: CTA
ataaatcttttaataatcca

SEQ ID NO: 77790 - DNA, 20 bp, Artificial Sequence
  Description of Artificial Sequence: Synthetic oligonucleotide
  Target: SCNA; (+) strand; PAM type: YTN; PAM sequence: CTT
ttaataatccagaaagaaac

SEQ ID NO: 77791 - DNA, 20 bp, Artificial Sequence
  Description of Artificial Sequence: Synthetic oligonucleotide
  Target: SCNA; (+) strand; PAM type: YTN; PAM sequence: TTT
taataatccagaaagaaaca

SEQ ID NO: 77792 - DNA, 20 bp, Artificial Sequence
  Description of Artificial Sequence: Synthetic oligonucleotide
  Target: SCNA; (+) strand; PAM type: YTN; PAM sequence: TTT
aataatccagaaagaaacat

SEQ ID NO: 77793 - DNA, 20 bp, Artificial Sequence
  Description of Artificial Sequence: Synthetic oligonucleotide
  Target: SCNA; (+) strand; PAM type: YTN; PAM sequence: TTA
ataatccagaaagaaacatt

SEQ ID NO: 77794 - DNA, 20 bp, Artificial Sequence
  Description of Artificial Sequence: Synthetic oligonucleotide
  Target: SCNA; (+) strand; PAM type: YTN; PAM sequence: TTT
agaagacattaagaaagaca

SEQ ID NO: 77795 - DNA, 20 bp, Artificial Sequence
  Description of Artificial Sequence: Synthetic oligonucleotide
  Target: SCNA; (+) strand; PAM type: YTN; PAM sequence: TTA
gaagacattaagaaagacat

SEQ ID NO: 77796 - DNA, 20 bp, Artificial Sequence
  Description of Artificial Sequence: Synthetic oligonucleotide
  Target: SCNA; (+) strand; PAM type: YTN; PAM sequence: TTA
agaaagacatattcagaatt

SEQ ID NO: 77797 - DNA, 20 bp, Artificial Sequence
  Description of Artificial Sequence: Synthetic oligonucleotide
  Target: SCNA; (+) strand; PAM type: YTN; PAM sequence: TTC
agaattcagacagaagctca

SEQ ID NO: 77798 - DNA, 20 bp, Artificial Sequence
  Description of Artificial Sequence: Synthetic oligonucleotide
  Target: SCNA; (+) strand; PAM type: YTN; PAM sequence: TTC
agacagaagctcataaaagc

SEQ ID NO: 77799 - DNA, 20 bp, Artificial Sequence
  Description of Artificial Sequence: Synthetic oligonucleotide
  Target: SCNA; (+) strand; PAM type: YTN; PAM sequence: CTC
ataaaagctaacataaaaag

SEQ ID NO: 77800 - DNA, 20 bp, Artificial Sequence
  Description of Artificial Sequence: Synthetic oligonucleotide
  Target: SCNA; (+) strand; PAM type: YTN; PAM sequence: CTA
acataaaaagcaggttaaaa

SEQ ID NO: 77801 - DNA, 20 bp, Artificial Sequence
  Description of Artificial Sequence: Synthetic oligonucleotide
  Target: SCNA; (+) strand; PAM type: YTN; PAM sequence: TTA
aaaatcaatttctacaagaa

SEQ ID NO: 77802 - DNA, 20 bp, Artificial Sequence
  Description of Artificial Sequence: Synthetic oligonucleotide
  Target: SCNA; (+) strand; PAM type: YTN; PAM sequence: TTT
ctacaagaaaaatatagaca

SEQ ID NO: 77803 - DNA, 20 bp, Artificial Sequence
  Description of Artificial Sequence: Synthetic oligonucleotide
  Target: SCNA; (+) strand; PAM type: YTN; PAM sequence: TTC
tacaagaaaaatatagacat

SEQ ID NO: 77804 - DNA, 20 bp, Artificial Sequence
  Description of Artificial Sequence: Synthetic oligonucleotide
  Target: SCNA; (+) strand; PAM type: YTN; PAM sequence: CTA
caagaaaaatatagacatat

SEQ ID NO: 77805 - DNA, 20 bp, Artificial Sequence
  Description of Artificial Sequence: Synthetic oligonucleotide
  Target: SCNA; (+) strand; PAM type: YTN; PAM sequence: CTA
gacgaatgcaaattttcaaa

SEQ ID NO: 77806 - DNA, 20 bp, Artificial Sequence
  Description of Artificial Sequence: Synthetic oligonucleotide
  Target: SCNA; (+) strand; PAM type: YTN; PAM sequence: TTT
tcaaagctatattttaccaa

SEQ ID NO: 77807 - DNA, 20 bp, Artificial Sequence
  Description of Artificial Sequence: Synthetic oligonucleotide
  Target: SCNA; (+) strand; PAM type: YTN; PAM sequence: TTT
caaagctatattttaccaaa

SEQ ID NO: 77808 - DNA, 20 bp, Artificial Sequence
  Description of Artificial Sequence: Synthetic oligonucleotide
  Target: SCNA; (+) strand; PAM type: YTN; PAM sequence: TTC
aaagctatattttaccaaat

SEQ ID NO: 77809 - DNA, 20 bp, Artificial Sequence
  Description of Artificial Sequence: Synthetic oligonucleotide
  Target: SCNA; (+) strand; PAM type: YTN; PAM sequence: CTA
tattttaccaaattttaaaa

SEQ ID NO: 77810 - DNA, 20 bp, Artificial Sequence
  Description of Artificial Sequence: Synthetic oligonucleotide
  Target: SCNA; (+) strand; PAM type: YTN; PAM sequence: TTT
taccaaattttaaaagttaa

SEQ ID NO: 77811 - DNA, 20 bp, Artificial Sequence
  Description of Artificial Sequence: Synthetic oligonucleotide
  Target: SCNA; (+) strand; PAM type: YTN; PAM sequence: TTT
accaaattttaaaagttaac

SEQ ID NO: 77812 - DNA, 20 bp, Artificial Sequence
  Description of Artificial Sequence: Synthetic oligonucleotide
  Target: SCNA; (+) strand; PAM type: YTN; PAM sequence: TTA
ccaaattttaaaagttaact

SEQ ID NO: 77813 - DNA, 20 bp, Artificial Sequence
  Description of Artificial Sequence: Synthetic oligonucleotide
  Target: SCNA; (+) strand; PAM type: YTN; PAM sequence: TTT
taaaagttaactttaaaaga

SEQ ID NO: 77814 - DNA, 20 bp, Artificial Sequence
  Description of Artificial Sequence: Synthetic oligonucleotide
  Target: SCNA; (+) strand; PAM type: YTN; PAM sequence: TTT
aaaagttaactttaaaagaa

SEQ ID NO: 77815 - DNA, 20 bp, Artificial Sequence
  Description of Artificial Sequence: Synthetic oligonucleotide
  Target: SCNA; (+) strand; PAM type: YTN; PAM sequence: TTA
aaagttaactttaaaagaag

SEQ ID NO: 77816 - DNA, 20 bp, Artificial Sequence
  Description of Artificial Sequence: Synthetic oligonucleotide
  Target: SCNA; (+) strand; PAM type: YTN; PAM sequence: TTA
actttaaaagaagaattaac

SEQ ID NO: 77817 - DNA, 20 bp, Artificial Sequence
  Description of Artificial Sequence: Synthetic oligonucleotide
  Target: SCNA; (+) strand; PAM type: YTN; PAM sequence: CTT
taaaagaagaattaaccttg

SEQ ID NO: 77818 - DNA, 20 bp, Artificial Sequence
  Description of Artificial Sequence: Synthetic oligonucleotide
  Target: SCNA; (+) strand; PAM type: YTN; PAM sequence: TTT
aaaagaagaattaaccttgg

SEQ ID NO: 77819 - DNA, 20 bp, Artificial Sequence
  Description of Artificial Sequence: Synthetic oligonucleotide
  Target: SCNA; (+) strand; PAM type: YTN; PAM sequence: TTA
aaagaagaattaaccttggt

SEQ ID NO: 77820 - DNA, 20 bp, Artificial Sequence
  Description of Artificial Sequence: Synthetic oligonucleotide
  Target: SCNA; (+) strand; PAM type: YTN; PAM sequence: TTA
accttggtggcagcaaaatc

SEQ ID NO: 77821 - DNA, 20 bp, Artificial Sequence
  Description of Artificial Sequence: Synthetic oligonucleotide
  Target: SCNA; (+) strand; PAM type: YTN; PAM sequence: CTT
ggtggcagcaaaatccatgt

SEQ ID NO: 77822 - DNA, 20 bp, Artificial Sequence
  Description of Artificial Sequence: Synthetic oligonucleotide
  Target: SCNA; (+) strand; PAM type: YTN; PAM sequence: TTG
gtggcagcaaaatccatgtc

SEQ ID NO: 77823 - DNA, 20 bp, Artificial Sequence
  Description of Artificial Sequence: Synthetic oligonucleotide
  Target: SCNA; (+) strand; PAM type: YTN; PAM sequence: CTG
tgtgtctggctgatttgggt

SEQ ID NO: 77824 - DNA, 20 bp, Artificial Sequence
  Description of Artificial Sequence: Synthetic oligonucleotide
  Target: SCNA; (+) strand; PAM type: YTN; PAM sequence: CTG
gctgatttgggttcaattaa

SEQ ID NO: 77825 - DNA, 20 bp, Artificial Sequence
  Description of Artificial Sequence: Synthetic oligonucleotide
  Target: SCNA; (+) strand; PAM type: YTN; PAM sequence: CTG
atttgggttcaattaaaatc

SEQ ID NO: 77826 - DNA, 20 bp, Artificial Sequence
  Description of Artificial Sequence: Synthetic oligonucleotide
  Target: SCNA; (+) strand; PAM type: YTN; PAM sequence: TTT
gggttcaattaaaatcttgg

SEQ ID NO: 77827 - DNA, 20 bp, Artificial Sequence
  Description of Artificial Sequence: Synthetic oligonucleotide
  Target: SCNA; (+) strand; PAM type: YTN; PAM sequence: TTG
ggttcaattaaaatcttggg

SEQ ID NO: 77828 - DNA, 20 bp, Artificial Sequence
  Description of Artificial Sequence: Synthetic oligonucleotide
  Target: SCNA; (+) strand; PAM type: YTN; PAM sequence: TTC
aattaaaatcttgggtagag

SEQ ID NO: 77829 - DNA, 20 bp, Artificial Sequence
  Description of Artificial Sequence: Synthetic oligonucleotide
  Target: SCNA; (+) strand; PAM type: YTN; PAM sequence: TTA
aaatcttgggtagagaacac

SEQ ID NO: 77830 - DNA, 20 bp, Artificial Sequence
  Description of Artificial Sequence: Synthetic oligonucleotide
  Target: SCNA; (+) strand; PAM type: YTN; PAM sequence: CTT
gggtagagaacacttaagtg

SEQ ID NO: 77831 - DNA, 20 bp, Artificial Sequence
  Description of Artificial Sequence: Synthetic oligonucleotide
  Target: SCNA; (+) strand; PAM type: YTN; PAM sequence: TTG
ggtagagaacacttaagtga

SEQ ID NO: 77832 - DNA, 20 bp, Artificial Sequence
  Description of Artificial Sequence: Synthetic oligonucleotide
  Target: SCNA; (+) strand; PAM type: YTN; PAM sequence: CTT
aagtgaaaatatagggcaaa

SEQ ID NO: 77833 - DNA, 20 bp, Artificial Sequence
  Description of Artificial Sequence: Synthetic oligonucleotide
  Target: SCNA; (+) strand; PAM type: YTN; PAM sequence: TTA
agtgaaaatatagggcaaaa

SEQ ID NO: 77834 - DNA, 20 bp, Artificial Sequence
  Description of Artificial Sequence: Synthetic oligonucleotide
  Target: SCNA; (+) strand; PAM type: YTN; PAM sequence: TTC
catacaaaatataatgaata

SEQ ID NO: 77835 - DNA, 20 bp, Artificial Sequence
  Description of Artificial Sequence: Synthetic oligonucleotide
  Target: SCNA; (+) strand; PAM type: YTN; PAM sequence: TTT
cgcatataaccaaattccaa

SEQ ID NO: 77836 - DNA, 20 bp, Artificial Sequence
  Description of Artificial Sequence: Synthetic oligonucleotide
  Target: SCNA; (+) strand; PAM type: YTN; PAM sequence: TTC
gcatataaccaaattccaac

SEQ ID NO: 77837 - DNA, 20 bp, Artificial Sequence
  Description of Artificial Sequence: Synthetic oligonucleotide
  Target: SCNA; (+) strand; PAM type: YTN; PAM sequence: TTC
caacattttaaggaaggtat

SEQ ID NO: 77838 - DNA, 20 bp, Artificial Sequence
  Description of Artificial Sequence: Synthetic oligonucleotide
  Target: SCNA; (+) strand; PAM type: YTN; PAM sequence: TTT
taaggaaggtattaatttca

SEQ ID NO: 77839 - DNA, 20 bp, Artificial Sequence
  Description of Artificial Sequence: Synthetic oligonucleotide
  Target: SCNA; (+) strand; PAM type: YTN; PAM sequence: TTT
aaggaaggtattaatttcaa

SEQ ID NO: 77840 - DNA, 20 bp, Artificial Sequence
  Description of Artificial Sequence: Synthetic oligonucleotide
  Target: SCNA; (+) strand; PAM type: YTN; PAM sequence: TTA
aggaaggtattaatttcaag

SEQ ID NO: 77841 - DNA, 20 bp, Artificial Sequence
  Description of Artificial Sequence: Synthetic oligonucleotide
  Target: SCNA; (+) strand; PAM type: YTN; PAM sequence: TTA
atttcaagctaatatccaaa

SEQ ID NO: 77842 - DNA, 20 bp, Artificial Sequence
  Description of Artificial Sequence: Synthetic oligonucleotide
  Target: SCNA; (+) strand; PAM type: YTN; PAM sequence: TTT
caagctaatatccaaatttg

SEQ ID NO: 77843 - DNA, 20 bp, Artificial Sequence
  Description of Artificial Sequence: Synthetic oligonucleotide
  Target: SCNA; (+) strand; PAM type: YTN; PAM sequence: TTC
aagctaatatccaaatttgt

SEQ ID NO: 77844 - DNA, 20 bp, Artificial Sequence
  Description of Artificial Sequence: Synthetic oligonucleotide
  Target: SCNA; (+) strand; PAM type: YTN; PAM sequence: CTA
atatccaaatttgtctggta

SEQ ID NO: 77845 - DNA, 20 bp, Artificial Sequence
  Description of Artificial Sequence: Synthetic oligonucleotide
  Target: SCNA; (+) strand; PAM type: YTN; PAM sequence: TTT
gtctggtaagaaaaaggtga

SEQ ID NO: 77846 - DNA, 20 bp, Artificial Sequence
  Description of Artificial Sequence: Synthetic oligonucleotide
  Target: SCNA; (+) strand; PAM type: YTN; PAM sequence: TTG
tctggtaagaaaaaggtgag

SEQ ID NO: 77847 - DNA, 20 bp, Artificial Sequence
  Description of Artificial Sequence: Synthetic oligonucleotide
  Target: SCNA; (+) strand; PAM type: YTN; PAM sequence: CTG
gtaagaaaaaggtgagcatg

SEQ ID NO: 77848 - DNA, 20 bp, Artificial Sequence
  Description of Artificial Sequence: Synthetic oligonucleotide
  Target: SCNA; (+) strand; PAM type: YTN; PAM sequence: CTA
tgatagtggttgccattact

SEQ ID NO: 77849 - DNA, 20 bp, Artificial Sequence
  Description of Artificial Sequence: Synthetic oligonucleotide
  Target: SCNA; (+) strand; PAM type: YTN; PAM sequence: TTG
ccattacttctacttttgtg

SEQ ID NO: 77850 - DNA, 20 bp, Artificial Sequence
  Description of Artificial Sequence: Synthetic oligonucleotide
  Target: SCNA; (+) strand; PAM type: YTN; PAM sequence: TTA
cttctacttttgtgaggcag

SEQ ID NO: 77851 - DNA, 20 bp, Artificial Sequence
  Description of Artificial Sequence: Synthetic oligonucleotide
  Target: SCNA; (+) strand; PAM type: YTN; PAM sequence: CTT
ctacttttgtgaggcagaat

SEQ ID NO: 77852 - DNA, 20 bp, Artificial Sequence
  Description of Artificial Sequence: Synthetic oligonucleotide
  Target: SCNA; (+) strand; PAM type: YTN; PAM sequence: TTC
tacttttgtgaggcagaata

SEQ ID NO: 77853 - DNA, 20 bp, Artificial Sequence
  Description of Artificial Sequence: Synthetic oligonucleotide
  Target: SCNA; (+) strand; PAM type: YTN; PAM sequence: CTA
cttttgtgaggcagaatagg

SEQ ID NO: 77854 - DNA, 20 bp, Artificial Sequence
  Description of Artificial Sequence: Synthetic oligonucleotide
  Target: SCNA; (+) strand; PAM type: YTN; PAM sequence: CTT
ttgtgaggcagaataggtgg

SEQ ID NO: 77855 - DNA, 20 bp, Artificial Sequence
  Description of Artificial Sequence: Synthetic oligonucleotide
  Target: SCNA; (+) strand; PAM type: YTN; PAM sequence: TTT
tgtgaggcagaataggtggg

SEQ ID NO: 77856 - DNA, 20 bp, Artificial Sequence
  Description of Artificial Sequence: Synthetic oligonucleotide
  Target: SCNA; (+) strand; PAM type: YTN; PAM sequence: TTT
gtgaggcagaataggtggga

SEQ ID NO: 77857 - DNA, 20 bp, Artificial Sequence
  Description of Artificial Sequence: Synthetic oligonucleotide
  Target: SCNA; (+) strand; PAM type: YTN; PAM sequence: TTG
tgaggcagaataggtgggac

SEQ ID NO: 77858 - DNA, 20 bp, Artificial Sequence
  Description of Artificial Sequence: Synthetic oligonucleotide
  Target: SCNA; (+) strand; PAM type: YTN; PAM sequence: CTC
tagggctcttctgattttat

SEQ ID NO: 77859 - DNA, 20 bp, Artificial Sequence
  Description of Artificial Sequence: Synthetic oligonucleotide
  Target: SCNA; (+) strand; PAM type: YTN; PAM sequence: CTA
gggctcttctgattttattc

SEQ ID NO: 77860 - DNA, 20 bp, Artificial Sequence
  Description of Artificial Sequence: Synthetic oligonucleotide
  Target: SCNA; (+) strand; PAM type: YTN; PAM sequence: CTC
ttctgattttattctatcaa

SEQ ID NO: 77861 - DNA, 20 bp, Artificial Sequence
  Description of Artificial Sequence: Synthetic oligonucleotide
  Target: SCNA; (+) strand; PAM type: YTN; PAM sequence: CTT
ctgattttattctatcaatt

SEQ ID NO: 77862 - DNA, 20 bp, Artificial Sequence
  Description of Artificial Sequence: Synthetic oligonucleotide
  Target: SCNA; (+) strand; PAM type: YTN; PAM sequence: TTC
tgattttattctatcaatta

SEQ ID NO: 77863 - DNA, 20 bp, Artificial Sequence
  Description of Artificial Sequence: Synthetic oligonucleotide
  Target: SCNA; (+) strand; PAM type: YTN; PAM sequence: CTG
attttattctatcaattata

SEQ ID NO: 77864 - DNA, 20 bp, Artificial Sequence
  Description of Artificial Sequence: Synthetic oligonucleotide
  Target: SCNA; (+) strand; PAM type: YTN; PAM sequence: TTT
tattctatcaattataagag

SEQ ID NO: 77865 - DNA, 20 bp, Artificial Sequence
  Description of Artificial Sequence: Synthetic oligonucleotide
  Target: SCNA; (+) strand; PAM type: YTN; PAM sequence: TTT
attctatcaattataagagg

SEQ ID NO: 77866 - DNA, 20 bp, Artificial Sequence
  Description of Artificial Sequence: Synthetic oligonucleotide
  Target: SCNA; (+) strand; PAM type: YTN; PAM sequence: TTA
ttctatcaattataagaggt

SEQ ID NO: 77867 - DNA, 20 bp, Artificial Sequence
  Description of Artificial Sequence: Synthetic oligonucleotide
  Target: SCNA; (+) strand; PAM type: YTN; PAM sequence: TTC
tatcaattataagaggtctg

SEQ ID NO: 77868 - DNA, 20 bp, Artificial Sequence
  Description of Artificial Sequence: Synthetic oligonucleotide
  Target: SCNA; (+) strand; PAM type: YTN; PAM sequence: CTA
tcaattataagaggtctgag

SEQ ID NO: 77869 - DNA, 20 bp, Artificial Sequence
  Description of Artificial Sequence: Synthetic oligonucleotide
  Target: SCNA; (+) strand; PAM type: YTN; PAM sequence: TTA
taagaggtctgagaacagga

SEQ ID NO: 77870 - DNA, 20 bp, Artificial Sequence
  Description of Artificial Sequence: Synthetic oligonucleotide
  Target: SCNA; (+) strand; PAM type: YTN; PAM sequence: CTG
agaacaggaaatgaaaaaag

SEQ ID NO: 77871 - DNA, 20 bp, Artificial Sequence
  Description of Artificial Sequence: Synthetic oligonucleotide
  Target: SCNA; (+) strand; PAM type: YTN; PAM sequence: CTA
tgaccctcaagccatctagc

SEQ ID NO: 77872 - DNA, 20 bp, Artificial Sequence
  Description of Artificial Sequence: Synthetic oligonucleotide
  Target: SCNA; (+) strand; PAM type: YTN; PAM sequence: CTC
aagccatctagctcaaacga

SEQ ID NO: 77873 - DNA, 20 bp, Artificial Sequence
  Description of Artificial Sequence: Synthetic oligonucleotide
  Target: SCNA; (+) strand; PAM type: YTN; PAM sequence: CTA
gctcaaacgatttcactggc

SEQ ID NO: 77874 - DNA, 20 bp, Artificial Sequence
  Description of Artificial Sequence: Synthetic oligonucleotide
  Target: SCNA; (+) strand; PAM type: YTN; PAM sequence: CTC
aaacgatttcactggcatct

SEQ ID NO: 77875 - DNA, 20 bp, Artificial Sequence
  Description of Artificial Sequence: Synthetic oligonucleotide
  Target: SCNA; (+) strand; PAM type: YTN; PAM sequence: TTT
cactggcatctaggatctga

SEQ ID NO: 77876 - DNA, 20 bp, Artificial Sequence
  Description of Artificial Sequence: Synthetic oligonucleotide
  Target: SCNA; (+) strand; PAM type: YTN; PAM sequence: TTC
actggcatctaggatctgat

SEQ ID NO: 77877 - DNA, 20 bp, Artificial Sequence
  Description of Artificial Sequence: Synthetic oligonucleotide
  Target: SCNA; (+) strand; PAM type: YTN; PAM sequence: CTG
gcatctaggatctgatatat

SEQ ID NO: 77878 - DNA, 20 bp, Artificial Sequence
  Description of Artificial Sequence: Synthetic oligonucleotide
  Target: SCNA; (+) strand; PAM type: YTN; PAM sequence: CTA
ggatctgatatattttggat

SEQ ID NO: 77879 - DNA, 20 bp, Artificial Sequence
  Description of Artificial Sequence: Synthetic oligonucleotide
  Target: SCNA; (+) strand; PAM type: YTN; PAM sequence: CTG
atatattttggattggggaa

SEQ ID NO: 77880 - DNA, 20 bp, Artificial Sequence
  Description of Artificial Sequence: Synthetic oligonucleotide
  Target: SCNA; (+) strand; PAM type: YTN; PAM sequence: TTT
tggattggggaagagtaaac

SEQ ID NO: 77881 - DNA, 20 bp, Artificial Sequence
  Description of Artificial Sequence: Synthetic oligonucleotide
  Target: SCNA; (+) strand; PAM type: YTN; PAM sequence: TTT
ggattggggaagagtaaaca

SEQ ID NO: 77882 - DNA, 20 bp, Artificial Sequence
  Description of Artificial Sequence: Synthetic oligonucleotide
  Target: SCNA; (+) strand; PAM type: YTN; PAM sequence: TTG
gattggggaagagtaaacac

SEQ ID NO: 77883 - DNA, 20 bp, Artificial Sequence
  Description of Artificial Sequence: Synthetic oligonucleotide
  Target: SCNA; (+) strand; PAM type: YTN; PAM sequence: TTG
gggaagagtaaacacaggca

SEQ ID NO: 77884 - DNA, 20 bp, Artificial Sequence
  Description of Artificial Sequence: Synthetic oligonucleotide
  Target: SCNA; (+) strand; PAM type: YTN; PAM sequence: TTT
gcattggatgtgaagctaat

SEQ ID NO: 77885 - DNA, 20 bp, Artificial Sequence
  Description of Artificial Sequence: Synthetic oligonucleotide
  Target: SCNA; (+) strand; PAM type: YTN; PAM sequence: TTG
cattggatgtgaagctaatg

SEQ ID NO: 77886 - DNA, 20 bp, Artificial Sequence
  Description of Artificial Sequence: Synthetic oligonucleotide
  Target: SCNA; (+) strand; PAM type: YTN; PAM sequence: TTG
gatgtgaagctaatggccct

SEQ ID NO: 77887 - DNA, 20 bp, Artificial Sequence
  Description of Artificial Sequence: Synthetic oligonucleotide
  Target: SCNA; (+) strand; PAM type: YTN; PAM sequence: CTA
atggcccttccacataattt

SEQ ID NO: 77888 - DNA, 20 bp, Artificial Sequence
  Description of Artificial Sequence: Synthetic oligonucleotide
  Target: SCNA; (+) strand; PAM type: YTN; PAM sequence: CTT
ccacataattttgctgtagg

SEQ ID NO: 77889 - DNA, 20 bp, Artificial Sequence
  Description of Artificial Sequence: Synthetic oligonucleotide
  Target: SCNA; (+) strand; PAM type: YTN; PAM sequence: TTC
cacataattttgctgtagga

SEQ ID NO: 77890 - DNA, 20 bp, Artificial Sequence
  Description of Artificial Sequence: Synthetic oligonucleotide
  Target: SCNA; (+) strand; PAM type: YTN; PAM sequence: TTT
tgctgtaggatatcaattga

SEQ ID NO: 77891 - DNA, 20 bp, Artificial Sequence
  Description of Artificial Sequence: Synthetic oligonucleotide
  Target: SCNA; (+) strand; PAM type: YTN; PAM sequence: TTT
gctgtaggatatcaattgat

SEQ ID NO: 77892 - DNA, 20 bp, Artificial Sequence
  Description of Artificial Sequence: Synthetic oligonucleotide
  Target: SCNA; (+) strand; PAM type: YTN; PAM sequence: TTG
ctgtaggatatcaattgatt

SEQ ID NO: 77893 - DNA, 20 bp, Artificial Sequence
  Description of Artificial Sequence: Synthetic oligonucleotide
  Target: SCNA; (+) strand; PAM type: YTN; PAM sequence: CTG
taggatatcaattgattccc

SEQ ID NO: 77894 - DNA, 20 bp, Artificial Sequence
  Description of Artificial Sequence: Synthetic oligonucleotide
  Target: SCNA; (+) strand; PAM type: YTN; PAM sequence: TTG
attccctgtttcagaggaag

SEQ ID NO: 77895 - DNA, 20 bp, Artificial Sequence
  Description of Artificial Sequence: Synthetic oligonucleotide
  Target: SCNA; (+) strand; PAM type: YTN; PAM sequence: TTC
cctgtttcagaggaaggatt

SEQ ID NO: 77896 - DNA, 20 bp, Artificial Sequence
  Description of Artificial Sequence: Synthetic oligonucleotide
  Target: SCNA; (+) strand; PAM type: YTN; PAM sequence: CTG
tttcagaggaaggattgtta

SEQ ID NO: 77897 - DNA, 20 bp, Artificial Sequence
  Description of Artificial Sequence: Synthetic oligonucleotide
  Target: SCNA; (+) strand; PAM type: YTN; PAM sequence: TTT
cagaggaaggattgttaagc

SEQ ID NO: 77898 - DNA, 20 bp, Artificial Sequence
  Description of Artificial Sequence: Synthetic oligonucleotide
  Target: SCNA; (+) strand; PAM type: YTN; PAM sequence: TTC
agaggaaggattgttaagct

SEQ ID NO: 77899 - DNA, 20 bp, Artificial Sequence
  Description of Artificial Sequence: Synthetic oligonucleotide
  Target: SCNA; (+) strand; PAM type: YTN; PAM sequence: TTG
ttaagctaaaatggtttcaa

SEQ ID NO: 77900 - DNA, 20 bp, Artificial Sequence
  Description of Artificial Sequence: Synthetic oligonucleotide
  Target: SCNA; (+) strand; PAM type: YTN; PAM sequence: TTA
agctaaaatggtttcaacca

SEQ ID NO: 77901 - DNA, 20 bp, Artificial Sequence
  Description of Artificial Sequence: Synthetic oligonucleotide
  Target: SCNA; (+) strand; PAM type: YTN; PAM sequence: CTA
aaatggtttcaaccagatca

SEQ ID NO: 77902 - DNA, 20 bp, Artificial Sequence
  Description of Artificial Sequence: Synthetic oligonucleotide
  Target: SCNA; (+) strand; PAM type: YTN; PAM sequence: TTT
caaccagatcaaacattaaa

SEQ ID NO: 77903 - DNA, 20 bp, Artificial Sequence
  Description of Artificial Sequence: Synthetic oligonucleotide
  Target: SCNA; (+) strand; PAM type: YTN; PAM sequence: TTC
aaccagatcaaacattaaag

SEQ ID NO: 77904 - DNA, 20 bp, Artificial Sequence
  Description of Artificial Sequence: Synthetic oligonucleotide
  Target: SCNA; (+) strand; PAM type: YTN; PAM sequence: TTA
aagtaagcagagtttttcag

SEQ ID NO: 77905 - DNA, 20 bp, Artificial Sequence
  Description of Artificial Sequence: Synthetic oligonucleotide
  Target: SCNA; (+) strand; PAM type: YTN; PAM sequence: TTT
ttcagtagatttgactagat

SEQ ID NO: 77906 - DNA, 20 bp, Artificial Sequence
  Description of Artificial Sequence: Synthetic oligonucleotide
  Target: SCNA; (+) strand; PAM type: YTN; PAM sequence: TTT
tcagtagatttgactagatt

SEQ ID NO: 77907 - DNA, 20 bp, Artificial Sequence
  Description of Artificial Sequence: Synthetic oligonucleotide
  Target: SCNA; (+) strand; PAM type: YTN; PAM sequence: TTT
cagtagatttgactagattc

SEQ ID NO: 77908 - DNA, 20 bp, Artificial Sequence
  Description of Artificial Sequence: Synthetic oligonucleotide
  Target: SCNA; (+) strand; PAM type: YTN; PAM sequence: TTC
agtagatttgactagattct

SEQ ID NO: 77909 - DNA, 20 bp, Artificial Sequence
  Description of Artificial Sequence: Synthetic oligonucleotide
  Target: SCNA; (+) strand; PAM type: YTN; PAM sequence: TTT
gactagattcttcatttact

SEQ ID NO: 77910 - DNA, 20 bp, Artificial Sequence
  Description of Artificial Sequence: Synthetic oligonucleotide
  Target: SCNA; (+) strand; PAM type: YTN; PAM sequence: TTG
actagattcttcatttacta

SEQ ID NO: 77911 - DNA, 20 bp, Artificial Sequence
  Description of Artificial Sequence: Synthetic oligonucleotide
  Target: SCNA; (+) strand; PAM type: YTN; PAM sequence: CTA
gattcttcatttactataaa

SEQ ID NO: 77912 - DNA, 20 bp, Artificial Sequence
  Description of Artificial Sequence: Synthetic oligonucleotide
  Target: SCNA; (+) strand; PAM type: YTN; PAM sequence: TTC
ttcatttactataaagatct

SEQ ID NO: 77913 - DNA, 20 bp, Artificial Sequence
  Description of Artificial Sequence: Synthetic oligonucleotide
  Target: SCNA; (+) strand; PAM type: YTN; PAM sequence: CTT
catttactataaagatctgc

SEQ ID NO: 77914 - DNA, 20 bp, Artificial Sequence
  Description of Artificial Sequence: Synthetic oligonucleotide
  Target: SCNA; (+) strand; PAM type: YTN; PAM sequence: TTC
atttactataaagatctgcc

SEQ ID NO: 77915 - DNA, 20 bp, Artificial Sequence
  Description of Artificial Sequence: Synthetic oligonucleotide
  Target: SCNA; (+) strand; PAM type: YTN; PAM sequence: TTT
actataaagatctgccacac

SEQ ID NO: 77916 - DNA, 20 bp, Artificial Sequence
  Description of Artificial Sequence: Synthetic oligonucleotide
  Target: SCNA; (+) strand; PAM type: YTN; PAM sequence: TTA
ctataaagatctgccacacc

SEQ ID NO: 77917 - DNA, 20 bp, Artificial Sequence
  Description of Artificial Sequence: Synthetic oligonucleotide
  Target: SCNA; (+) strand; PAM type: YTN; PAM sequence: CTA
taaagatctgccacacccga

SEQ ID NO: 77918 - DNA, 20 bp, Artificial Sequence
  Description of Artificial Sequence: Synthetic oligonucleotide
  Target: SCNA; (+) strand; PAM type: YTN; PAM sequence: CTG
ccacacccgaaataccacct

SEQ ID NO: 77919 - DNA, 20 bp, Artificial Sequence
  Description of Artificial Sequence: Synthetic oligonucleotide
  Target: SCNA; (+) strand; PAM type: YTN; PAM sequence: CTG
aaattagttttctagttaaa

SEQ ID NO: 77920 - DNA, 20 bp, Artificial Sequence
  Description of Artificial Sequence: Synthetic oligonucleotide
  Target: SCNA; (+) strand; PAM type: YTN; PAM sequence: TTA
gttttctagttaaatcagta

SEQ ID NO: 77921 - DNA, 20 bp, Artificial Sequence
  Description of Artificial Sequence: Synthetic oligonucleotide
  Target: SCNA; (+) strand; PAM type: YTN; PAM sequence: TTT
tctagttaaatcagtataga

SEQ ID NO: 77922 - DNA, 20 bp, Artificial Sequence
  Description of Artificial Sequence: Synthetic oligonucleotide
  Target: SCNA; (+) strand; PAM type: YTN; PAM sequence: TTT
ctagttaaatcagtatagac

SEQ ID NO: 77923 - DNA, 20 bp, Artificial Sequence
  Description of Artificial Sequence: Synthetic oligonucleotide
  Target: SCNA; (+) strand; PAM type: YTN; PAM sequence: TTC
tagttaaatcagtatagact

SEQ ID NO: 77924 - DNA, 20 bp, Artificial Sequence
  Description of Artificial Sequence: Synthetic oligonucleotide
  Target: SCNA; (+) strand; PAM type: YTN; PAM sequence: CTA
gttaaatcagtatagactat

SEQ ID NO: 77925 - DNA, 20 bp, Artificial Sequence
  Description of Artificial Sequence: Synthetic oligonucleotide
  Target: SCNA; (+) strand; PAM type: YTN; PAM sequence: TTA
aatcagtatagactatggat

SEQ ID NO: 77926 - DNA, 20 bp, Artificial Sequence
  Description of Artificial Sequence: Synthetic oligonucleotide
  Target: SCNA; (+) strand; PAM type: YTN; PAM sequence: CTA
tggataaaagaagttacgaa

SEQ ID NO: 77927 - DNA, 20 bp, Artificial Sequence
  Description of Artificial Sequence: Synthetic oligonucleotide
  Target: SCNA; (+) strand; PAM type: YTN; PAM sequence: TTA
cgaagacaaccctcttaatc

SEQ ID NO: 77928 - DNA, 20 bp, Artificial Sequence
  Description of Artificial Sequence: Synthetic oligonucleotide
  Target: SCNA; (+) strand; PAM type: YTN; PAM sequence: CTC
ttaatcttgatcaatattca

SEQ ID NO: 77929 - DNA, 20 bp, Artificial Sequence
  Description of Artificial Sequence: Synthetic oligonucleotide
  Target: SCNA; (+) strand; PAM type: YTN; PAM sequence: CTT
aatcttgatcaatattcaga

SEQ ID NO: 77930 - DNA, 20 bp, Artificial Sequence
  Description of Artificial Sequence: Synthetic oligonucleotide
  Target: SCNA; (+) strand; PAM type: YTN; PAM sequence: TTA
atcttgatcaatattcagag

SEQ ID NO: 77931 - DNA, 20 bp, Artificial Sequence
  Description of Artificial Sequence: Synthetic oligonucleotide
  Target: SCNA; (+) strand; PAM type: YTN; PAM sequence: CTT
gatcaatattcagagatgac

SEQ ID NO: 77932 - DNA, 20 bp, Artificial Sequence
  Description of Artificial Sequence: Synthetic oligonucleotide
  Target: SCNA; (+) strand; PAM type: YTN; PAM sequence: TTG
atcaatattcagagatgact

SEQ ID NO: 77933 - DNA, 20 bp, Artificial Sequence
  Description of Artificial Sequence: Synthetic oligonucleotide
  Target: SCNA; (+) strand; PAM type: YTN; PAM sequence: TTC
agagatgactactccccatc

SEQ ID NO: 77934 - DNA, 20 bp, Artificial Sequence
  Description of Artificial Sequence: Synthetic oligonucleotide
  Target: SCNA; (+) strand; PAM type: YTN; PAM sequence: CTA
ctccccatcacaaaagctaa

SEQ ID NO: 77935 - DNA, 20 bp, Artificial Sequence
  Description of Artificial Sequence: Synthetic oligonucleotide
  Target: SCNA; (+) strand; PAM type: YTN; PAM sequence: CTC
cccatcacaaaagctaattc

SEQ ID NO: 77936 - DNA, 20 bp, Artificial Sequence
  Description of Artificial Sequence: Synthetic oligonucleotide
  Target: SCNA; (+) strand; PAM type: YTN; PAM sequence: CTA
attcgtttttcacatttttc

SEQ ID NO: 77937 - DNA, 20 bp, Artificial Sequence
  Description of Artificial Sequence: Synthetic oligonucleotide
  Target: SCNA; (+) strand; PAM type: YTN; PAM sequence: TTC
gtttttcacatttttctctg

SEQ ID NO: 77938 - DNA, 20 bp, Artificial Sequence
  Description of Artificial Sequence: Synthetic oligonucleotide
  Target: SCNA; (+) strand; PAM type: YTN; PAM sequence: TTT
ttcacatttttctctgctcc

SEQ ID NO: 77939 - DNA, 20 bp, Artificial Sequence
  Description of Artificial Sequence: Synthetic oligonucleotide
  Target: SCNA; (+) strand; PAM type: YTN; PAM sequence: TTT
tcacatttttctctgctcct

SEQ ID NO: 77940 - DNA, 20 bp, Artificial Sequence
  Description of Artificial Sequence: Synthetic oligonucleotide
  Target: SCNA; (+) strand; PAM type: YTN; PAM sequence: TTT
cacatttttctctgctccta

SEQ ID NO: 77941 - DNA, 20 bp, Artificial Sequence
  Description of Artificial Sequence: Synthetic oligonucleotide
  Target: SCNA; (+) strand; PAM type: YTN; PAM sequence: TTC
acatttttctctgctcctaa

SEQ ID NO: 77942 - DNA, 20 bp, Artificial Sequence
  Description of Artificial Sequence: Synthetic oligonucleotide
  Target: SCNA; (+) strand; PAM type: YTN; PAM sequence: TTT
ttctctgctcctaatgaaat

SEQ ID NO: 77943 - DNA, 20 bp, Artificial Sequence
  Description of Artificial Sequence: Synthetic oligonucleotide
  Target: SCNA; (+) strand; PAM type: YTN; PAM sequence: TTT
tctctgctcctaatgaaatc

SEQ ID NO: 77944 - DNA, 20 bp, Artificial Sequence
  Description of Artificial Sequence: Synthetic oligonucleotide
  Target: SCNA; (+) strand; PAM type: YTN; PAM sequence: TTT
ctctgctcctaatgaaatct

SEQ ID NO: 77945 - DNA, 20 bp, Artificial Sequence
  Description of Artificial Sequence: Synthetic oligonucleotide
  Target: SCNA; (+) strand; PAM type: YTN; PAM sequence: TTC
tctgctcctaatgaaatctt

SEQ ID NO: 77946 - DNA, 20 bp, Artificial Sequence
  Description of Artificial Sequence: Synthetic oligonucleotide
  Target: SCNA; (+) strand; PAM type: YTN; PAM sequence: CTC
tgctcctaatgaaatctttt

SEQ ID NO: 77947 - DNA, 20 bp, Artificial Sequence
  Description of Artificial Sequence: Synthetic oligonucleotide
  Target: SCNA; (+) strand; PAM type: YTN; PAM sequence: CTG
ctcctaatgaaatctttttt

SEQ ID NO: 77948 - DNA, 20 bp, Artificial Sequence
  Description of Artificial Sequence: Synthetic oligonucleotide
  Target: SCNA; (+) strand; PAM type: YTN; PAM sequence: CTC
ctaatgaaatcttttttgct

SEQ ID NO: 77949 - DNA, 20 bp, Artificial Sequence
  Description of Artificial Sequence: Synthetic oligonucleotide
  Target: SCNA; (+) strand; PAM type: YTN; PAM sequence: CTA
atgaaatcttttttgctgaa

SEQ ID NO: 77950 - DNA, 20 bp, Artificial Sequence
  Description of Artificial Sequence: Synthetic oligonucleotide
  Target: SCNA; (+) strand; PAM type: YTN; PAM sequence: CTT
ttttgctgaagtttctgaag

SEQ ID NO: 77951 - DNA, 20 bp, Artificial Sequence
  Description of Artificial Sequence: Synthetic oligonucleotide
  Target: SCNA; (+) strand; PAM type: YTN; PAM sequence: TTT
tttgctgaagtttctgaaga

SEQ ID NO: 77952 - DNA, 20 bp, Artificial Sequence
  Description of Artificial Sequence: Synthetic oligonucleotide
  Target: SCNA; (+) strand; PAM type: YTN; PAM sequence: TTT
ttgctgaagtttctgaagaa

SEQ ID NO: 77953 - DNA, 20 bp, Artificial Sequence
  Description of Artificial Sequence: Synthetic oligonucleotide
  Target: SCNA; (+) strand; PAM type: YTN; PAM sequence: TTT
tgctgaagtttctgaagaaa

SEQ ID NO: 77954 - DNA, 20 bp, Artificial Sequence
  Description of Artificial Sequence: Synthetic oligonucleotide
  Target: SCNA; (+) strand; PAM type: YTN; PAM sequence: TTT
gctgaagtttctgaagaaat

SEQ ID NO: 77955 - DNA, 20 bp, Artificial Sequence
  Description of Artificial Sequence: Synthetic oligonucleotide
  Target: SCNA; (+) strand; PAM type: YTN; PAM sequence: TTG
ctgaagtttctgaagaaata

SEQ ID NO: 77956 - DNA, 20 bp, Artificial Sequence
  Description of Artificial Sequence: Synthetic oligonucleotide
  Target: SCNA; (+) strand; PAM type: YTN; PAM sequence: CTG
aagtttctgaagaaataaat

SEQ ID NO: 77957 - DNA, 20 bp, Artificial Sequence
  Description of Artificial Sequence: Synthetic oligonucleotide
  Target: SCNA; (+) strand; PAM type: YTN; PAM sequence: TTT
ctgaagaaataaataaagaa

SEQ ID NO: 77958 - DNA, 20 bp, Artificial Sequence
  Description of Artificial Sequence: Synthetic oligonucleotide
  Target: SCNA; (+) strand; PAM type: YTN; PAM sequence: TTC
tgaagaaataaataaagaag

SEQ ID NO: 77959 - DNA, 20 bp, Artificial Sequence
  Description of Artificial Sequence: Synthetic oligonucleotide
  Target: SCNA; (+) strand; PAM type: YTN; PAM sequence: CTG
aagaaataaataaagaagcc

SEQ ID NO: 77960 - DNA, 20 bp, Artificial Sequence
  Description of Artificial Sequence: Synthetic oligonucleotide
  Target: SCNA; (+) strand; PAM type: YTN; PAM sequence: CTG
gtgcctctcagagttccaca

SEQ ID NO: 77961 - DNA, 20 bp, Artificial Sequence
  Description of Artificial Sequence: Synthetic oligonucleotide
  Target: SCNA; (+) strand; PAM type: YTN; PAM sequence: CTC
tcagagttccacacagctga

SEQ ID NO: 77962 - DNA, 20 bp, Artificial Sequence
  Description of Artificial Sequence: Synthetic oligonucleotide
  Target: SCNA; (+) strand; PAM type: YTN; PAM sequence: CTC
agagttccacacagctgatg

SEQ ID NO: 77963 - DNA, 20 bp, Artificial Sequence
  Description of Artificial Sequence: Synthetic oligonucleotide
  Target: SCNA; (+) strand; PAM type: YTN; PAM sequence: TTC
cacacagctgatgagtctag

SEQ ID NO: 77964 - DNA, 20 bp, Artificial Sequence
  Description of Artificial Sequence: Synthetic oligonucleotide
  Target: SCNA; (+) strand; PAM type: YTN; PAM sequence: CTG
atgagtctaggcagtgacaa

SEQ ID NO: 77965 - DNA, 20 bp, Artificial Sequence
  Description of Artificial Sequence: Synthetic oligonucleotide
  Target: SCNA; (+) strand; PAM type: YTN; PAM sequence: CTA
ggcagtgacaaatgacacta

SEQ ID NO: 77966 - DNA, 20 bp, Artificial Sequence
  Description of Artificial Sequence: Synthetic oligonucleotide
  Target: SCNA; (+) strand; PAM type: YTN; PAM sequence: CTA
tattcctcagcgtgcaacct

SEQ ID NO: 77967 - DNA, 20 bp, Artificial Sequence
  Description of Artificial Sequence: Synthetic oligonucleotide
  Target: SCNA; (+) strand; PAM type: YTN; PAM sequence: TTC
ctcagcgtgcaacctttctc

SEQ ID NO: 77968 - DNA, 20 bp, Artificial Sequence
  Description of Artificial Sequence: Synthetic oligonucleotide
  Target: SCNA; (+) strand; PAM type: YTN; PAM sequence: CTC
agcgtgcaacctttctctcc

SEQ ID NO: 77969 - DNA, 20 bp, Artificial Sequence
  Description of Artificial Sequence: Synthetic oligonucleotide
  Target: SCNA; (+) strand; PAM type: YTN; PAM sequence: CTT
tctctccctctcatcttctt

SEQ ID NO: 77970 - DNA, 20 bp, Artificial Sequence
  Description of Artificial Sequence: Synthetic oligonucleotide
  Target: SCNA; (+) strand; PAM type: YTN; PAM sequence: TTT
ctctccctctcatcttcttg

SEQ ID NO: 77971 - DNA, 20 bp, Artificial Sequence
  Description of Artificial Sequence: Synthetic oligonucleotide
  Target: SCNA; (+) strand; PAM type: YTN; PAM sequence: TTC
tctccctctcatcttcttgc

SEQ ID NO: 77972 - DNA, 20 bp, Artificial Sequence
  Description of Artificial Sequence: Synthetic oligonucleotide
  Target: SCNA; (+) strand; PAM type: YTN; PAM sequence: CTC
tccctctcatcttcttgcaa

SEQ ID NO: 77973 - DNA, 20 bp, Artificial Sequence
  Description of Artificial Sequence: Synthetic oligonucleotide
  Target: SCNA; (+) strand; PAM type: YTN; PAM sequence: CTC
cctctcatcttcttgcaatg

SEQ ID NO: 77974 - DNA, 20 bp, Artificial Sequence
  Description of Artificial Sequence: Synthetic oligonucleotide
  Target: SCNA; (+) strand; PAM type: YTN; PAM sequence: CTC
tcatcttcttgcaatggaac

SEQ ID NO: 77975 - DNA, 20 bp, Artificial Sequence
  Description of Artificial Sequence: Synthetic oligonucleotide
  Target: SCNA; (+) strand; PAM type: YTN; PAM sequence: CTC
atcttcttgcaatggaacac

SEQ ID NO: 77976 - DNA, 20 bp, Artificial Sequence
  Description of Artificial Sequence: Synthetic oligonucleotide
  Target: SCNA; (+) strand; PAM type: YTN; PAM sequence: CTT
cttgcaatggaacactgcta

SEQ ID NO: 77977 - DNA, 20 bp, Artificial Sequence
  Description of Artificial Sequence: Synthetic oligonucleotide
  Target: SCNA; (+) strand; PAM type: YTN; PAM sequence: TTC
ttgcaatggaacactgctac

SEQ ID NO: 77978 - DNA, 20 bp, Artificial Sequence
  Description of Artificial Sequence: Synthetic oligonucleotide
  Target: SCNA; (+) strand; PAM type: YTN; PAM sequence: CTT
gcaatggaacactgctacat

SEQ ID NO: 77979 - DNA, 20 bp, Artificial Sequence
  Description of Artificial Sequence: Synthetic oligonucleotide
  Target: SCNA; (+) strand; PAM type: YTN; PAM sequence: TTG
caatggaacactgctacatt

SEQ ID NO: 77980 - DNA, 20 bp, Artificial Sequence
  Description of Artificial Sequence: Synthetic oligonucleotide
  Target: SCNA; (+) strand; PAM type: YTN; PAM sequence: CTG
ctacattccttgcagaggaa

SEQ ID NO: 77981 - DNA, 20 bp, Artificial Sequence
  Description of Artificial Sequence: Synthetic oligonucleotide
  Target: SCNA; (+) strand; PAM type: YTN; PAM sequence: CTA
cattccttgcagaggaaacg

SEQ ID NO: 77982 - DNA, 20 bp, Artificial Sequence
  Description of Artificial Sequence: Synthetic oligonucleotide
  Target: SCNA; (+) strand; PAM type: YTN; PAM sequence: TTC
cttgcagaggaaacgtactg

SEQ ID NO: 77983 - DNA, 20 bp, Artificial Sequence
  Description of Artificial Sequence: Synthetic oligonucleotide
  Target: SCNA; (+) strand; PAM type: YTN; PAM sequence: CTT
gcagaggaaacgtactgtac

SEQ ID NO: 77984 - DNA, 20 bp, Artificial Sequence
  Description of Artificial Sequence: Synthetic oligonucleotide
  Target: SCNA; (+) strand; PAM type: YTN; PAM sequence: TTG
cagaggaaacgtactgtaca

SEQ ID NO: 77985 - DNA, 20 bp, Artificial Sequence
  Description of Artificial Sequence: Synthetic oligonucleotide
  Target: SCNA; (+) strand; PAM type: YTN; PAM sequence: CTG
tacatttcatagctgtcacc

SEQ ID NO: 77986 - DNA, 20 bp, Artificial Sequence
  Description of Artificial Sequence: Synthetic oligonucleotide
  Target: SCNA; (+) strand; PAM type: YTN; PAM sequence: TTT
catagctgtcaccttggcat

SEQ ID NO: 77987 - DNA, 20 bp, Artificial Sequence
  Description of Artificial Sequence: Synthetic oligonucleotide
  Target: SCNA; (+) strand; PAM type: YTN; PAM sequence: TTC
atagctgtcaccttggcata

SEQ ID NO: 77988 - DNA, 20 bp, Artificial Sequence
  Description of Artificial Sequence: Synthetic oligonucleotide
  Target: SCNA; (+) strand; PAM type: YTN; PAM sequence: CTG
tcaccttggcataaaaggca

SEQ ID NO: 77989 - DNA, 20 bp, Artificial Sequence
  Description of Artificial Sequence: Synthetic oligonucleotide
  Target: SCNA; (+) strand; PAM type: YTN; PAM sequence: CTT
ggcataaaaggcagagggag

SEQ ID NO: 77990 - DNA, 20 bp, Artificial Sequence
  Description of Artificial Sequence: Synthetic oligonucleotide
  Target: SCNA; (+) strand; PAM type: YTN; PAM sequence: TTG
gcataaaaggcagagggagg

SEQ ID NO: 77991 - DNA, 20 bp, Artificial Sequence
  Description of Artificial Sequence: Synthetic oligonucleotide
  Target: SCNA; (+) strand; PAM type: YTN; PAM sequence: TTC
ttcttttggtctgcctaaac

SEQ ID NO: 77992 - DNA, 20 bp, Artificial Sequence
  Description of Artificial Sequence: Synthetic oligonucleotide
  Target: SCNA; (+) strand; PAM type: YTN; PAM sequence: CTT
cttttggtctgcctaaacat

SEQ ID NO: 77993 - DNA, 20 bp, Artificial Sequence
  Description of Artificial Sequence: Synthetic oligonucleotide
  Target: SCNA; (+) strand; PAM type: YTN; PAM sequence: TTC
ttttggtctgcctaaacatt

SEQ ID NO: 77994 - DNA, 20 bp, Artificial Sequence
  Description of Artificial Sequence: Synthetic oligonucleotide
  Target: SCNA; (+) strand; PAM type: YTN; PAM sequence: CTT
ttggtctgcctaaacatttt

SEQ ID NO: 77995 - DNA, 20 bp, Artificial Sequence
  Description of Artificial Sequence: Synthetic oligonucleotide
  Target: SCNA; (+) strand; PAM type: YTN; PAM sequence: TTT
tggtctgcctaaacatttta

SEQ ID NO: 77996 - DNA, 20 bp, Artificial Sequence
  Description of Artificial Sequence: Synthetic oligonucleotide
  Target: SCNA; (+) strand; PAM type: YTN; PAM sequence: TTT
ggtctgcctaaacattttac

SEQ ID NO: 77997 - DNA, 20 bp, Artificial Sequence
  Description of Artificial Sequence: Synthetic oligonucleotide
  Target: SCNA; (+) strand; PAM type: YTN; PAM sequence: TTG
gtctgcctaaacattttact

SEQ ID NO: 77998 - DNA, 20 bp, Artificial Sequence
  Description of Artificial Sequence: Synthetic oligonucleotide
  Target: SCNA; (+) strand; PAM type: YTN; PAM sequence: CTG
cctaaacattttactttatt

SEQ ID NO: 77999 - DNA, 20 bp, Artificial Sequence
  Description of Artificial Sequence: Synthetic oligonucleotide
  Target: SCNA; (+) strand; PAM type: YTN; PAM sequence: CTA
aacattttactttatttttt

SEQ ID NO: 78000 - DNA, 20 bp, Artificial Sequence
  Description of Artificial Sequence: Synthetic oligonucleotide
  Target: SCNA; (+) strand; PAM type: YTN; PAM sequence: TTT
tactttattttttatatatc

SEQ ID NO: 78001 - DNA, 20 bp, Artificial Sequence
  Description of Artificial Sequence: Synthetic oligonucleotide
  Target: SCNA; (+) strand; PAM type: YTN; PAM sequence: TTT
actttattttttatatatca

SEQ ID NO: 78002 - DNA, 20 bp, Artificial Sequence
  Description of Artificial Sequence: Synthetic oligonucleotide
  Target: SCNA; (+) strand; PAM type: YTN; PAM sequence: TTA
ctttattttttatatatcaa

SEQ ID NO: 78003 - DNA, 20 bp, Artificial Sequence
  Description of Artificial Sequence: Synthetic oligonucleotide
  Target: SCNA; (+) strand; PAM type: YTN; PAM sequence: CTT
tattttttatatatcaataa

SEQ ID NO: 78004 - DNA, 20 bp, Artificial Sequence
  Description of Artificial Sequence: Synthetic oligonucleotide
  Target: SCNA; (+) strand; PAM type: YTN; PAM sequence: TTT
attttttatatatcaataac

SEQ ID NO: 78005 - DNA, 20 bp, Artificial Sequence
  Description of Artificial Sequence: Synthetic oligonucleotide
  Target: SCNA; (+) strand; PAM type: YTN; PAM sequence: TTA
ttttttatatatcaataacc

SEQ ID NO: 78006 - DNA, 20 bp, Artificial Sequence
  Description of Artificial Sequence: Synthetic oligonucleotide
  Target: SCNA; (+) strand; PAM type: YTN; PAM sequence: TTT
tttatatatcaataaccatg

SEQ ID NO: 78007 - DNA, 20 bp, Artificial Sequence
  Description of Artificial Sequence: Synthetic oligonucleotide
  Target: SCNA; (+) strand; PAM type: YTN; PAM sequence: TTT
ttatatatcaataaccatga

SEQ ID NO: 78008 - DNA, 20 bp, Artificial Sequence
  Description of Artificial Sequence: Synthetic oligonucleotide
  Target: SCNA; (+) strand; PAM type: YTN; PAM sequence: TTT
tatatatcaataaccatgag

SEQ ID NO: 78009 - DNA, 20 bp, Artificial Sequence
  Description of Artificial Sequence: Synthetic oligonucleotide
  Target: SCNA; (+) strand; PAM type: YTN; PAM sequence: TTT
atatatcaataaccatgaga

SEQ ID NO: 78010 - DNA, 20 bp, Artificial Sequence
  Description of Artificial Sequence: Synthetic oligonucleotide
  Target: SCNA; (+) strand; PAM type: YTN; PAM sequence: TTA
tatatcaataaccatgagaa

SEQ ID NO: 78011 - DNA, 20 bp, Artificial Sequence
  Description of Artificial Sequence: Synthetic oligonucleotide
  Target: SCNA; (+) strand; PAM type: YTN; PAM sequence: CTA
ttgagtaagtttagatataa

SEQ ID NO: 78012 - DNA, 20 bp, Artificial Sequence
  Description of Artificial Sequence: Synthetic oligonucleotide
  Target: SCNA; (+) strand; PAM type: YTN; PAM sequence: TTG
agtaagtttagatataaaac

SEQ ID NO: 78013 - DNA, 20 bp, Artificial Sequence
  Description of Artificial Sequence: Synthetic oligonucleotide
  Target: SCNA; (+) strand; PAM type: YTN; PAM sequence: TTT
agatataaaacagagaactt

SEQ ID NO: 78014 - DNA, 20 bp, Artificial Sequence
  Description of Artificial Sequence: Synthetic oligonucleotide
  Target: SCNA; (+) strand; PAM type: YTN; PAM sequence: TTA
gatataaaacagagaacttt

SEQ ID NO: 78015 - DNA, 20 bp, Artificial Sequence
  Description of Artificial Sequence: Synthetic oligonucleotide
  Target: SCNA; (+) strand; PAM type: YTN; PAM sequence: CTT
tgttttggaaggcattactt

SEQ ID NO: 78016 - DNA, 20 bp, Artificial Sequence
  Description of Artificial Sequence: Synthetic oligonucleotide
  Target: SCNA; (+) strand; PAM type: YTN; PAM sequence: TTT
gttttggaaggcattacttt

SEQ ID NO: 78017 - DNA, 20 bp, Artificial Sequence
  Description of Artificial Sequence: Synthetic oligonucleotide
  Target: SCNA; (+) strand; PAM type: YTN; PAM sequence: TTG
ttttggaaggcattactttt

SEQ ID NO: 78018 - DNA, 20 bp, Artificial Sequence
  Description of Artificial Sequence: Synthetic oligonucleotide
  Target: SCNA; (+) strand; PAM type: YTN; PAM sequence: TTT
tggaaggcattacttttcaa

SEQ ID NO: 78019 - DNA, 20 bp, Artificial Sequence
  Description of Artificial Sequence: Synthetic oligonucleotide
  Target: SCNA; (+) strand; PAM type: YTN; PAM sequence: TTT
ggaaggcattacttttcaaa

SEQ ID NO: 78020 - DNA, 20 bp, Artificial Sequence
  Description of Artificial Sequence: Synthetic oligonucleotide
  Target: SCNA; (+) strand; PAM type: YTN; PAM sequence: TTG
gaaggcattacttttcaaag

SEQ ID NO: 78021 - DNA, 20 bp, Artificial Sequence
  Description of Artificial Sequence: Synthetic oligonucleotide
  Target: SCNA; (+) strand; PAM type: YTN; PAM sequence: TTA
cttttcaaaggaaatgcatc

SEQ ID NO: 78022 - DNA, 20 bp, Artificial Sequence
  Description of Artificial Sequence: Synthetic oligonucleotide
  Target: SCNA; (+) strand; PAM type: YTN; PAM sequence: CTT
ttcaaaggaaatgcatcgtg

SEQ ID NO: 78023 - DNA, 20 bp, Artificial Sequence
  Description of Artificial Sequence: Synthetic oligonucleotide
  Target: SCNA; (+) strand; PAM type: YTN; PAM sequence: TTT
tcaaaggaaatgcatcgtgg

SEQ ID NO: 78024 - DNA, 20 bp, Artificial Sequence
  Description of Artificial Sequence: Synthetic oligonucleotide
  Target: SCNA; (+) strand; PAM type: YTN; PAM sequence: TTT
caaaggaaatgcatcgtgga

SEQ ID NO: 78025 - DNA, 20 bp, Artificial Sequence
  Description of Artificial Sequence: Synthetic oligonucleotide
  Target: SCNA; (+) strand; PAM type: YTN; PAM sequence: TTC
aaaggaaatgcatcgtggag

SEQ ID NO: 78026 - DNA, 20 bp, Artificial Sequence
  Description of Artificial Sequence: Synthetic oligonucleotide
  Target: SCNA; (+) strand; PAM type: YTN; PAM sequence: TTT
tcaagagcgatcggaagctc

SEQ ID NO: 78027 - DNA, 20 bp, Artificial Sequence
  Description of Artificial Sequence: Synthetic oligonucleotide
  Target: SCNA; (+) strand; PAM type: YTN; PAM sequence: TTT
caagagcgatcggaagctcc

SEQ ID NO: 78028 - DNA, 20 bp, Artificial Sequence
  Description of Artificial Sequence: Synthetic oligonucleotide
  Target: SCNA; (+) strand; PAM type: YTN; PAM sequence: TTC
aagagcgatcggaagctccc

SEQ ID NO: 78029 - DNA, 20 bp, Artificial Sequence
  Description of Artificial Sequence: Synthetic oligonucleotide
  Target: SCNA; (+) strand; PAM type: YTN; PAM sequence: CTC
cctgccttgatattcctaat

SEQ ID NO: 78030 - DNA, 20 bp, Artificial Sequence
  Description of Artificial Sequence: Synthetic oligonucleotide
  Target: SCNA; (+) strand; PAM type: YTN; PAM sequence: CTG
ccttgatattcctaatcttc

SEQ ID NO: 78031 - DNA, 20 bp, Artificial Sequence
  Description of Artificial Sequence: Synthetic oligonucleotide
  Target: SCNA; (+) strand; PAM type: YTN; PAM sequence: CTT
gatattcctaatcttctttc

SEQ ID NO: 78032 - DNA, 20 bp, Artificial Sequence
  Description of Artificial Sequence: Synthetic oligonucleotide
  Target: SCNA; (+) strand; PAM type: YTN; PAM sequence: TTG
atattcctaatcttctttct

SEQ ID NO: 78033 - DNA, 20 bp, Artificial Sequence
  Description of Artificial Sequence: Synthetic oligonucleotide
  Target: SCNA; (+) strand; PAM type: YTN; PAM sequence: TTC
ctaatcttctttctggcatc

SEQ ID NO: 78034 - DNA, 20 bp, Artificial Sequence
  Description of Artificial Sequence: Synthetic oligonucleotide
  Target: SCNA; (+) strand; PAM type: YTN; PAM sequence: CTA
atcttctttctggcatctta

SEQ ID NO: 78035 - DNA, 20 bp, Artificial Sequence
  Description of Artificial Sequence: Synthetic oligonucleotide
  Target: SCNA; (+) strand; PAM type: YTN; PAM sequence: CTT
ctttctggcatcttatgctc

SEQ ID NO: 78036 - DNA, 20 bp, Artificial Sequence
  Description of Artificial Sequence: Synthetic oligonucleotide
  Target: SCNA; (+) strand; PAM type: YTN; PAM sequence: TTC
tttctggcatcttatgctca

SEQ ID NO: 78037 - DNA, 20 bp, Artificial Sequence
  Description of Artificial Sequence: Synthetic oligonucleotide
  Target: SCNA; (+) strand; PAM type: YTN; PAM sequence: CTT
tctggcatcttatgctcacc

SEQ ID NO: 78038 - DNA, 20 bp, Artificial Sequence
  Description of Artificial Sequence: Synthetic oligonucleotide
  Target: SCNA; (+) strand; PAM type: YTN; PAM sequence: TTT
ctggcatcttatgctcacca

SEQ ID NO: 78039 - DNA, 20 bp, Artificial Sequence
  Description of Artificial Sequence: Synthetic oligonucleotide
  Target: SCNA; (+) strand; PAM type: YTN; PAM sequence: TTC
tggcatcttatgctcaccaa

SEQ ID NO: 78040 - DNA, 20 bp, Artificial Sequence
  Description of Artificial Sequence: Synthetic oligonucleotide
  Target: SCNA; (+) strand; PAM type: YTN; PAM sequence: CTG
gcatcttatgctcaccaact

SEQ ID NO: 78041 - DNA, 20 bp, Artificial Sequence
  Description of Artificial Sequence: Synthetic oligonucleotide
  Target: SCNA; (+) strand; PAM type: YTN; PAM sequence: CTT
atgctcaccaactgcctaat

SEQ ID NO: 78042 - DNA, 20 bp, Artificial Sequence
  Description of Artificial Sequence: Synthetic oligonucleotide
  Target: SCNA; (+) strand; PAM type: YTN; PAM sequence: TTA
tgctcaccaactgcctaata

SEQ ID NO: 78043 - DNA, 20 bp, Artificial Sequence
  Description of Artificial Sequence: Synthetic oligonucleotide
  Target: SCNA; (+) strand; PAM type: YTN; PAM sequence: CTC
accaactgcctaatagtgga

SEQ ID NO: 78044 - DNA, 20 bp, Artificial Sequence
  Description of Artificial Sequence: Synthetic oligonucleotide
  Target: SCNA; (+) strand; PAM type: YTN; PAM sequence: CTG
cctaatagtggatgcatgtg

SEQ ID NO: 78045 - DNA, 20 bp, Artificial Sequence
  Description of Artificial Sequence: Synthetic oligonucleotide
  Target: SCNA; (+) strand; PAM type: YTN; PAM sequence: CTA
atagtggatgcatgtggttc

SEQ ID NO: 78046 - DNA, 20 bp, Artificial Sequence
  Description of Artificial Sequence: Synthetic oligonucleotide
  Target: SCNA; (+) strand; PAM type: YTN; PAM sequence: TTC
tgcccatctgtccaattgcc

SEQ ID NO: 78047 - DNA, 20 bp, Artificial Sequence
  Description of Artificial Sequence: Synthetic oligonucleotide
  Target: SCNA; (+) strand; PAM type: YTN; PAM sequence: CTG
cccatctgtccaattgccat

SEQ ID NO: 78048 - DNA, 20 bp, Artificial Sequence
  Description of Artificial Sequence: Synthetic oligonucleotide
  Target: SCNA; (+) strand; PAM type: YTN; PAM sequence: CTG
tccaattgccattctaaatt

SEQ ID NO: 78049 - DNA, 20 bp, Artificial Sequence
  Description of Artificial Sequence: Synthetic oligonucleotide
  Target: SCNA; (+) strand; PAM type: YTN; PAM sequence: TTG
ccattctaaattatgtggtt

SEQ ID NO: 78050 - DNA, 20 bp, Artificial Sequence
  Description of Artificial Sequence: Synthetic oligonucleotide
  Target: SCNA; (+) strand; PAM type: YTN; PAM sequence: TTC
taaattatgtggtttactaa

SEQ ID NO: 78051 - DNA, 20 bp, Artificial Sequence
  Description of Artificial Sequence: Synthetic oligonucleotide
  Target: SCNA; (+) strand; PAM type: YTN; PAM sequence: CTA
aattatgtggtttactaaga

SEQ ID NO: 78052 - DNA, 20 bp, Artificial Sequence
  Description of Artificial Sequence: Synthetic oligonucleotide
  Target: SCNA; (+) strand; PAM type: YTN; PAM sequence: TTA
tgtggtttactaagaaaata

SEQ ID NO: 78053 - DNA, 20 bp, Artificial Sequence
  Description of Artificial Sequence: Synthetic oligonucleotide
  Target: SCNA; (+) strand; PAM type: YTN; PAM sequence: TTT
actaagaaaatacttaacat

SEQ ID NO: 78054 - DNA, 20 bp, Artificial Sequence
  Description of Artificial Sequence: Synthetic oligonucleotide
  Target: SCNA; (+) strand; PAM type: YTN; PAM sequence: TTA
ctaagaaaatacttaacatt

SEQ ID NO: 78055 - DNA, 20 bp, Artificial Sequence
  Description of Artificial Sequence: Synthetic oligonucleotide
  Target: SCNA; (+) strand; PAM type: YTN; PAM sequence: CTA
agaaaatacttaacattata

SEQ ID NO: 78056 - DNA, 20 bp, Artificial Sequence
  Description of Artificial Sequence: Synthetic oligonucleotide
  Target: SCNA; (+) strand; PAM type: YTN; PAM sequence: CTT
aacattatatgaataatgta

SEQ ID NO: 78057 - DNA, 20 bp, Artificial Sequence
  Description of Artificial Sequence: Synthetic oligonucleotide
  Target: SCNA; (+) strand; PAM type: YTN; PAM sequence: TTA
acattatatgaataatgtat

SEQ ID NO: 78058 - DNA, 20 bp, Artificial Sequence
  Description of Artificial Sequence: Synthetic oligonucleotide
  Target: SCNA; (+) strand; PAM type: YTN; PAM sequence: TTA
tatgaataatgtataattaa

SEQ ID NO: 78059 - DNA, 20 bp, Artificial Sequence
  Description of Artificial Sequence: Synthetic oligonucleotide
  Target: SCNA; (+) strand; PAM type: YTN; PAM sequence: TTA
attataagtagtttttaaat

SEQ ID NO: 78060 - DNA, 20 bp, Artificial Sequence
  Description of Artificial Sequence: Synthetic oligonucleotide
  Target: SCNA; (+) strand; PAM type: YTN; PAM sequence: TTA
taagtagtttttaaatcttc

SEQ ID NO: 78061 - DNA, 20 bp, Artificial Sequence
  Description of Artificial Sequence: Synthetic oligonucleotide
  Target: SCNA; (+) strand; PAM type: YTN; PAM sequence: TTT
ttaaatcttcaagatttatc

SEQ ID NO: 78062 - DNA, 20 bp, Artificial Sequence
  Description of Artificial Sequence: Synthetic oligonucleotide
  Target: SCNA; (+) strand; PAM type: YTN; PAM sequence: TTT
taaatcttcaagatttatct

SEQ ID NO: 78063 - DNA, 20 bp, Artificial Sequence
  Description of Artificial Sequence: Synthetic oligonucleotide
  Target: SCNA; (+) strand; PAM type: YTN; PAM sequence: TTT
aaatcttcaagatttatctc

SEQ ID NO: 78064 - DNA, 20 bp, Artificial Sequence
  Description of Artificial Sequence: Synthetic oligonucleotide
  Target: SCNA; (+) strand; PAM type: YTN; PAM sequence: TTA
aatcttcaagatttatctca

SEQ ID NO: 78065 - DNA, 20 bp, Artificial Sequence
  Description of Artificial Sequence: Synthetic oligonucleotide
  Target: SCNA; (+) strand; PAM type: YTN; PAM sequence: CTT
caagatttatctcatgagtg

SEQ ID NO: 78066 - DNA, 20 bp, Artificial Sequence
  Description of Artificial Sequence: Synthetic oligonucleotide
  Target: SCNA; (+) strand; PAM type: YTN; PAM sequence: TTC
aagatttatctcatgagtga

SEQ ID NO: 78067 - DNA, 20 bp, Artificial Sequence
  Description of Artificial Sequence: Synthetic oligonucleotide
  Target: SCNA; (+) strand; PAM type: YTN; PAM sequence: TTT
atctcatgagtgaaatggtt

SEQ ID NO: 78068 - DNA, 20 bp, Artificial Sequence
  Description of Artificial Sequence: Synthetic oligonucleotide
  Target: SCNA; (+) strand; PAM type: YTN; PAM sequence: TTA
tctcatgagtgaaatggttg

SEQ ID NO: 78069 - DNA, 20 bp, Artificial Sequence
  Description of Artificial Sequence: Synthetic oligonucleotide
  Target: SCNA; (+) strand; PAM type: YTN; PAM sequence: CTC
atgagtgaaatggttgcttt

SEQ ID NO: 78070 - DNA, 20 bp, Artificial Sequence
  Description of Artificial Sequence: Synthetic oligonucleotide
  Target: SCNA; (+) strand; PAM type: YTN; PAM sequence: TTG
ctttgttcttaaggagaaaa

SEQ ID NO: 78071 - DNA, 20 bp, Artificial Sequence
  Description of Artificial Sequence: Synthetic oligonucleotide
  Target: SCNA; (+) strand; PAM type: YTN; PAM sequence: CTT
tgttcttaaggagaaaatta

SEQ ID NO: 78072 - DNA, 20 bp, Artificial Sequence
  Description of Artificial Sequence: Synthetic oligonucleotide
  Target: SCNA; (+) strand; PAM type: YTN; PAM sequence: TTT
gttcttaaggagaaaattaa

SEQ ID NO: 78073 - DNA, 20 bp, Artificial Sequence
  Description of Artificial Sequence: Synthetic oligonucleotide
  Target: SCNA; (+) strand; PAM type: YTN; PAM sequence: TTG
ttcttaaggagaaaattaat

SEQ ID NO: 78074 - DNA, 20 bp, Artificial Sequence
  Description of Artificial Sequence: Synthetic oligonucleotide
  Target: SCNA; (+) strand; PAM type: YTN; PAM sequence: TTC
ttaaggagaaaattaattta

SEQ ID NO: 78075 - DNA, 20 bp, Artificial Sequence
  Description of Artificial Sequence: Synthetic oligonucleotide
  Target: SCNA; (+) strand; PAM type: YTN; PAM sequence: CTT
aaggagaaaattaatttatt

SEQ ID NO: 78076 - DNA, 20 bp, Artificial Sequence
  Description of Artificial Sequence: Synthetic oligonucleotide
  Target: SCNA; (+) strand; PAM type: YTN; PAM sequence: TTA
aggagaaaattaatttattt

SEQ ID NO: 78077 - DNA, 20 bp, Artificial Sequence
  Description of Artificial Sequence: Synthetic oligonucleotide
  Target: SCNA; (+) strand; PAM type: YTN; PAM sequence: TTA
atttatttcccacgtatcca

SEQ ID NO: 78078 - DNA, 20 bp, Artificial Sequence
  Description of Artificial Sequence: Synthetic oligonucleotide
  Target: SCNA; (+) strand; PAM type: YTN; PAM sequence: TTT
atttcccacgtatccatgta

SEQ ID NO: 78079 - DNA, 20 bp, Artificial Sequence
  Description of Artificial Sequence: Synthetic oligonucleotide
  Target: SCNA; (+) strand; PAM type: YTN; PAM sequence: TTA
tttcccacgtatccatgtac

SEQ ID NO: 78080 - DNA, 20 bp, Artificial Sequence
  Description of Artificial Sequence: Synthetic oligonucleotide
  Target: SCNA; (+) strand; PAM type: YTN; PAM sequence: TTT
cccacgtatccatgtacaat

SEQ ID NO: 78081 - DNA, 20 bp, Artificial Sequence
  Description of Artificial Sequence: Synthetic oligonucleotide
  Target: SCNA; (+) strand; PAM type: YTN; PAM sequence: TTC
ccacgtatccatgtacaata

SEQ ID NO: 78082 - DNA, 20 bp, Artificial Sequence
  Description of Artificial Sequence: Synthetic oligonucleotide
  Target: SCNA; (+) strand; PAM type: YTN; PAM sequence: CTG
ttataaacatataagaaaat

SEQ ID NO: 78083 - DNA, 20 bp, Artificial Sequence
  Description of Artificial Sequence: Synthetic oligonucleotide
  Target: SCNA; (+) strand; PAM type: YTN; PAM sequence: TTA
taaacatataagaaaatgag

SEQ ID NO: 78084 - DNA, 20 bp, Artificial Sequence
  Description of Artificial Sequence: Synthetic oligonucleotide
  Target: SCNA; (+) strand; PAM type: YTN; PAM sequence: CTA
tcatgataagtatacagcat

SEQ ID NO: 78085 - DNA, 20 bp, Artificial Sequence
  Description of Artificial Sequence: Synthetic oligonucleotide
  Target: SCNA; (+) strand; PAM type: YTN; PAM sequence: TTA
agtttattagaataccctca

SEQ ID NO: 78086 - DNA, 20 bp, Artificial Sequence
  Description of Artificial Sequence: Synthetic oligonucleotide
  Target: SCNA; (+) strand; PAM type: YTN; PAM sequence: TTT
attagaataccctcatattc

SEQ ID NO: 78087 - DNA, 20 bp, Artificial Sequence
  Description of Artificial Sequence: Synthetic oligonucleotide
  Target: SCNA; (+) strand; PAM type: YTN; PAM sequence: TTA
ttagaataccctcatattct

SEQ ID NO: 78088 - DNA, 20 bp, Artificial Sequence
  Description of Artificial Sequence: Synthetic oligonucleotide
  Target: SCNA; (+) strand; PAM type: YTN; PAM sequence: TTA
gaataccctcatattctata

SEQ ID NO: 78089 - DNA, 20 bp, Artificial Sequence
  Description of Artificial Sequence: Synthetic oligonucleotide
  Target: SCNA; (+) strand; PAM type: YTN; PAM sequence: CTC
atattctataatatacaaaa

SEQ ID NO: 78090 - DNA, 20 bp, Artificial Sequence
  Description of Artificial Sequence: Synthetic oligonucleotide
  Target: SCNA; (+) strand; PAM type: YTN; PAM sequence: TTC
tataatatacaaaattacta

SEQ ID NO: 78091 - DNA, 20 bp, Artificial Sequence
  Description of Artificial Sequence: Synthetic oligonucleotide
  Target: SCNA; (+) strand; PAM type: YTN; PAM sequence: CTA
taatatacaaaattactaac

SEQ ID NO: 78092 - DNA, 20 bp, Artificial Sequence
  Description of Artificial Sequence: Synthetic oligonucleotide
  Target: SCNA; (+) strand; PAM type: YTN; PAM sequence: TTA
ctaacgtgcagtgaaatcat

SEQ ID NO: 78093 - DNA, 20 bp, Artificial Sequence
  Description of Artificial Sequence: Synthetic oligonucleotide
  Target: SCNA; (+) strand; PAM type: YTN; PAM sequence: CTA
acgtgcagtgaaatcatata

SEQ ID NO: 78094 - DNA, 20 bp, Artificial Sequence
  Description of Artificial Sequence: Synthetic oligonucleotide
  Target: SCNA; (+) strand; PAM type: YTN; PAM sequence: TTC
tgaagtagtgaattgtttcc

SEQ ID NO: 78095 - DNA, 20 bp, Artificial Sequence
  Description of Artificial Sequence: Synthetic oligonucleotide
  Target: SCNA; (+) strand; PAM type: YTN; PAM sequence: CTG
aagtagtgaattgtttcctt

SEQ ID NO: 78096 - DNA, 20 bp, Artificial Sequence
  Description of Artificial Sequence: Synthetic oligonucleotide
  Target: SCNA; (+) strand; PAM type: YTN; PAM sequence: TTG
tttccttactgtttaacaca

SEQ ID NO: 78097 - DNA, 20 bp, Artificial Sequence
  Description of Artificial Sequence: Synthetic oligonucleotide
  Target: SCNA; (+) strand; PAM type: YTN; PAM sequence: TTT
ccttactgtttaacacattc

SEQ ID NO: 78098 - DNA, 20 bp, Artificial Sequence
  Description of Artificial Sequence: Synthetic oligonucleotide
  Target: SCNA; (+) strand; PAM type: YTN; PAM sequence: TTC
cttactgtttaacacattct

SEQ ID NO: 78099 - DNA, 20 bp, Artificial Sequence
  Description of Artificial Sequence: Synthetic oligonucleotide
  Target: SCNA; (+) strand; PAM type: YTN; PAM sequence: CTT
actgtttaacacattcttgc

SEQ ID NO: 78100 - DNA, 20 bp, Artificial Sequence
  Description of Artificial Sequence: Synthetic oligonucleotide
  Target: SCNA; (+) strand; PAM type: YTN; PAM sequence: TTA
ctgtttaacacattcttgca

SEQ ID NO: 78101 - DNA, 20 bp, Artificial Sequence
  Description of Artificial Sequence: Synthetic oligonucleotide
  Target: SCNA; (+) strand; PAM type: YTN; PAM sequence: CTG
tttaacacattcttgcagtt

SEQ ID NO: 78102 - DNA, 20 bp, Artificial Sequence
  Description of Artificial Sequence: Synthetic oligonucleotide
  Target: SCNA; (+) strand; PAM type: YTN; PAM sequence: TTT
aacacattcttgcagtttgt

SEQ ID NO: 78103 - DNA, 20 bp, Artificial Sequence
  Description of Artificial Sequence: Synthetic oligonucleotide
  Target: SCNA; (+) strand; PAM type: YTN; PAM sequence: TTA
acacattcttgcagtttgtc

SEQ ID NO: 78104 - DNA, 20 bp, Artificial Sequence
  Description of Artificial Sequence: Synthetic oligonucleotide
  Target: SCNA; (+) strand; PAM type: YTN; PAM sequence: TTC
ttgcagtttgtctttttaaa

SEQ ID NO: 78105 - DNA, 20 bp, Artificial Sequence
  Description of Artificial Sequence: Synthetic oligonucleotide
  Target: SCNA; (+) strand; PAM type: YTN; PAM sequence: CTT
gcagtttgtctttttaaaat

SEQ ID NO: 78106 - DNA, 20 bp, Artificial Sequence
  Description of Artificial Sequence: Synthetic oligonucleotide
  Target: SCNA; (+) strand; PAM type: YTN; PAM sequence: TTG
cagtttgtctttttaaaatt

SEQ ID NO: 78107 - DNA, 20 bp, Artificial Sequence
  Description of Artificial Sequence: Synthetic oligonucleotide
  Target: SCNA; (+) strand; PAM type: YTN; PAM sequence: TTT
gtctttttaaaattaaaatc

SEQ ID NO: 78108 - DNA, 20 bp, Artificial Sequence
  Description of Artificial Sequence: Synthetic oligonucleotide
  Target: SCNA; (+) strand; PAM type: YTN; PAM sequence: TTG
tctttttaaaattaaaatca

SEQ ID NO: 78109 - DNA, 20 bp, Artificial Sequence
  Description of Artificial Sequence: Synthetic oligonucleotide
  Target: SCNA; (+) strand; PAM type: YTN; PAM sequence: CTT
tttaaaattaaaatcaggaa

SEQ ID NO: 78110 - DNA, 20 bp, Artificial Sequence
  Description of Artificial Sequence: Synthetic oligonucleotide
  Target: SCNA; (+) strand; PAM type: YTN; PAM sequence: TTT
ttaaaattaaaatcaggaat

SEQ ID NO: 78111 - DNA, 20 bp, Artificial Sequence
  Description of Artificial Sequence: Synthetic oligonucleotide
  Target: SCNA; (+) strand; PAM type: YTN; PAM sequence: TTT
taaaattaaaatcaggaatt

SEQ ID NO: 78112 - DNA, 20 bp, Artificial Sequence
  Description of Artificial Sequence: Synthetic oligonucleotide
  Target: SCNA; (+) strand; PAM type: YTN; PAM sequence: TTT
aaaattaaaatcaggaattc

SEQ ID NO: 78113 - DNA, 20 bp, Artificial Sequence
  Description of Artificial Sequence: Synthetic oligonucleotide
  Target: SCNA; (+) strand; PAM type: YTN; PAM sequence: TTA
aaattaaaatcaggaattct

SEQ ID NO: 78114 - DNA, 20 bp, Artificial Sequence
  Description of Artificial Sequence: Synthetic oligonucleotide
  Target: SCNA; (+) strand; PAM type: YTN; PAM sequence: TTA
aaatcaggaattctgggcag

SEQ ID NO: 78115 - DNA, 20 bp, Artificial Sequence
  Description of Artificial Sequence: Synthetic oligonucleotide
  Target: SCNA; (+) strand; PAM type: YTN; PAM sequence: TTC
tgggcagttagttgtttttg

SEQ ID NO: 78116 - DNA, 20 bp, Artificial Sequence
  Description of Artificial Sequence: Synthetic oligonucleotide
  Target: SCNA; (+) strand; PAM type: YTN; PAM sequence: CTG
ggcagttagttgtttttgaa

SEQ ID NO: 78117 - DNA, 20 bp, Artificial Sequence
  Description of Artificial Sequence: Synthetic oligonucleotide
  Target: SCNA; (+) strand; PAM type: YTN; PAM sequence: TTA
gttgtttttgaagacaatgt

SEQ ID NO: 78118 - DNA, 20 bp, Artificial Sequence
  Description of Artificial Sequence: Synthetic oligonucleotide
  Target: SCNA; (+) strand; PAM type: YTN; PAM sequence: TTG
tttttgaagacaatgtcatt

SEQ ID NO: 78119 - DNA, 20 bp, Artificial Sequence
  Description of Artificial Sequence: Synthetic oligonucleotide
  Target: SCNA; (+) strand; PAM type: YTN; PAM sequence: TTT
ttgaagacaatgtcatttat

SEQ ID NO: 78120 - DNA, 20 bp, Artificial Sequence
  Description of Artificial Sequence: Synthetic oligonucleotide
  Target: SCNA; (+) strand; PAM type: YTN; PAM sequence: TTT
tgaagacaatgtcatttatc

SEQ ID NO: 78121 - DNA, 20 bp, Artificial Sequence
  Description of Artificial Sequence: Synthetic oligonucleotide
  Target: SCNA; (+) strand; PAM type: YTN; PAM sequence: TTT
gaagacaatgtcatttatct

SEQ ID NO: 78122 - DNA, 20 bp, Artificial Sequence
  Description of Artificial Sequence: Synthetic oligonucleotide
  Target: SCNA; (+) strand; PAM type: YTN; PAM sequence: TTG
aagacaatgtcatttatctt

SEQ ID NO: 78123 - DNA, 20 bp, Artificial Sequence
  Description of Artificial Sequence: Synthetic oligonucleotide
  Target: SCNA; (+) strand; PAM type: YTN; PAM sequence: TTT
atctttgctttaagaaggaa

SEQ ID NO: 78124 - DNA, 20 bp, Artificial Sequence
  Description of Artificial Sequence: Synthetic oligonucleotide
  Target: SCNA; (+) strand; PAM type: YTN; PAM sequence: TTA
tctttgctttaagaaggaaa

SEQ ID NO: 78125 - DNA, 20 bp, Artificial Sequence
  Description of Artificial Sequence: Synthetic oligonucleotide
  Target: SCNA; (+) strand; PAM type: YTN; PAM sequence: CTT
tgctttaagaaggaaacagt

SEQ ID NO: 78126 - DNA, 20 bp, Artificial Sequence
  Description of Artificial Sequence: Synthetic oligonucleotide
  Target: SCNA; (+) strand; PAM type: YTN; PAM sequence: TTT
gctttaagaaggaaacagtc

SEQ ID NO: 78127 - DNA, 20 bp, Artificial Sequence
  Description of Artificial Sequence: Synthetic oligonucleotide
  Target: SCNA; (+) strand; PAM type: YTN; PAM sequence: TTG
ctttaagaaggaaacagtct

SEQ ID NO: 78128 - DNA, 20 bp, Artificial Sequence
  Description of Artificial Sequence: Synthetic oligonucleotide
  Target: SCNA; (+) strand; PAM type: YTN; PAM sequence: CTT
taagaaggaaacagtctaca

SEQ ID NO: 78129 - DNA, 20 bp, Artificial Sequence
  Description of Artificial Sequence: Synthetic oligonucleotide
  Target: SCNA; (+) strand; PAM type: YTN; PAM sequence: TTT
aagaaggaaacagtctacat

SEQ ID NO: 78130 - DNA, 20 bp, Artificial Sequence
  Description of Artificial Sequence: Synthetic oligonucleotide
  Target: SCNA; (+) strand; PAM type: YTN; PAM sequence: TTA
agaaggaaacagtctacatt

SEQ ID NO: 78131 - DNA, 20 bp, Artificial Sequence
  Description of Artificial Sequence: Synthetic oligonucleotide
  Target: SCNA; (+) strand; PAM type: YTN; PAM sequence: CTA
catttaacaaacaattcatt

SEQ ID NO: 78132 - DNA, 20 bp, Artificial Sequence
  Description of Artificial Sequence: Synthetic oligonucleotide
  Target: SCNA; (+) strand; PAM type: YTN; PAM sequence: TTT
aacaaacaattcattttcta

SEQ ID NO: 78133 - DNA, 20 bp, Artificial Sequence
  Description of Artificial Sequence: Synthetic oligonucleotide
  Target: SCNA; (+) strand; PAM type: YTN; PAM sequence: TTA
acaaacaattcattttctac

SEQ ID NO: 78134 - DNA, 20 bp, Artificial Sequence
  Description of Artificial Sequence: Synthetic oligonucleotide
  Target: SCNA; (+) strand; PAM type: YTN; PAM sequence: TTC
attttctacatattaattga

SEQ ID NO: 78135 - DNA, 20 bp, Artificial Sequence
  Description of Artificial Sequence: Synthetic oligonucleotide
  Target: SCNA; (+) strand; PAM type: YTN; PAM sequence: TTT
tctacatattaattgagcag

SEQ ID NO: 78136 - DNA, 20 bp, Artificial Sequence
  Description of Artificial Sequence: Synthetic oligonucleotide
  Target: SCNA; (+) strand; PAM type: YTN; PAM sequence: TTT
ctacatattaattgagcagt

SEQ ID NO: 78137 - DNA, 20 bp, Artificial Sequence
  Description of Artificial Sequence: Synthetic oligonucleotide
  Target: SCNA; (+) strand; PAM type: YTN; PAM sequence: TTC
tacatattaattgagcagtg

SEQ ID NO: 78138 - DNA, 20 bp, Artificial Sequence
  Description of Artificial Sequence: Synthetic oligonucleotide
  Target: SCNA; (+) strand; PAM type: YTN; PAM sequence: CTA
catattaattgagcagtgaa

SEQ ID NO: 78139 - DNA, 20 bp, Artificial Sequence
  Description of Artificial Sequence: Synthetic oligonucleotide
  Target: SCNA; (+) strand; PAM type: YTN; PAM sequence: TTA
attgagcagtgaaaatatgg

SEQ ID NO: 78140 - DNA, 20 bp, Artificial Sequence
  Description of Artificial Sequence: Synthetic oligonucleotide
  Target: SCNA; (+) strand; PAM type: YTN; PAM sequence: TTG
agcagtgaaaatatggttgg

SEQ ID NO: 78141 - DNA, 20 bp, Artificial Sequence
  Description of Artificial Sequence: Synthetic oligonucleotide
  Target: SCNA; (+) strand; PAM type: YTN; PAM sequence: TTG
gcaggtctgaagaacaggga

SEQ ID NO: 78142 - DNA, 20 bp, Artificial Sequence
  Description of Artificial Sequence: Synthetic oligonucleotide
  Target: SCNA; (+) strand; PAM type: YTN; PAM sequence: CTG
aagaacagggaaaaagacag

SEQ ID NO: 78143 - DNA, 20 bp, Artificial Sequence
  Description of Artificial Sequence: Synthetic oligonucleotide
  Target: SCNA; (+) strand; PAM type: YTN; PAM sequence: TTA
gagtgtagttggagggtggc

SEQ ID NO: 78144 - DNA, 20 bp, Artificial Sequence
  Description of Artificial Sequence: Synthetic oligonucleotide
  Target: SCNA; (+) strand; PAM type: YTN; PAM sequence: TTG
gagggtggcatacaaggaga

SEQ ID NO: 78145 - DNA, 20 bp, Artificial Sequence
  Description of Artificial Sequence: Synthetic oligonucleotide
  Target: SCNA; (+) strand; PAM type: YTN; PAM sequence: TTA
ctgaggtccagataatgtag

SEQ ID NO: 78146 - DNA, 20 bp, Artificial Sequence
  Description of Artificial Sequence: Synthetic oligonucleotide
  Target: SCNA; (+) strand; PAM type: YTN; PAM sequence: CTG
aggtccagataatgtagggc

SEQ ID NO: 78147 - DNA, 20 bp, Artificial Sequence
  Description of Artificial Sequence: Synthetic oligonucleotide
  Target: SCNA; (+) strand; PAM type: YTN; PAM sequence: CTT
taaaacacagtaaagatttg

SEQ ID NO: 78148 - DNA, 20 bp, Artificial Sequence
  Description of Artificial Sequence: Synthetic oligonucleotide
  Target: SCNA; (+) strand; PAM type: YTN; PAM sequence: TTT
aaaacacagtaaagatttgc

SEQ ID NO: 78149 - DNA, 20 bp, Artificial Sequence
  Description of Artificial Sequence: Synthetic oligonucleotide
  Target: SCNA; (+) strand; PAM type: YTN; PAM sequence: TTA
aaacacagtaaagatttgca

SEQ ID NO: 78150 - DNA, 20 bp, Artificial Sequence
  Description of Artificial Sequence: Synthetic oligonucleotide
  Target: SCNA; (+) strand; PAM type: YTN; PAM sequence: TTT
gcatttcattctatgtatga

SEQ ID NO: 78151 - DNA, 20 bp, Artificial Sequence
  Description of Artificial Sequence: Synthetic oligonucleotide
  Target: SCNA; (+) strand; PAM type: YTN; PAM sequence: TTG
catttcattctatgtatgat

SEQ ID NO: 78152 - DNA, 20 bp, Artificial Sequence
  Description of Artificial Sequence: Synthetic oligonucleotide
  Target: SCNA; (+) strand; PAM type: YTN; PAM sequence: TTT
cattctatgtatgataagag

SEQ ID NO: 78153 - DNA, 20 bp, Artificial Sequence
  Description of Artificial Sequence: Synthetic oligonucleotide
  Target: SCNA; (+) strand; PAM type: YTN; PAM sequence: TTC
attctatgtatgataagagg

SEQ ID NO: 78154 - DNA, 20 bp, Artificial Sequence
  Description of Artificial Sequence: Synthetic oligonucleotide
  Target: SCNA; (+) strand; PAM type: YTN; PAM sequence: TTC
tatgtatgataagaggtcac

SEQ ID NO: 78155 - DNA, 20 bp, Artificial Sequence
  Description of Artificial Sequence: Synthetic oligonucleotide
  Target: SCNA; (+) strand; PAM type: YTN; PAM sequence: CTA
tgtatgataagaggtcactg

SEQ ID NO: 78156 - DNA, 20 bp, Artificial Sequence
  Description of Artificial Sequence: Synthetic oligonucleotide
  Target: SCNA; (+) strand; PAM type: YTN; PAM sequence: CTG
gatggttgggagcagagggg

SEQ ID NO: 78157 - DNA, 20 bp, Artificial Sequence
  Description of Artificial Sequence: Synthetic oligonucleotide
  Target: SCNA; (+) strand; PAM type: YTN; PAM sequence: TTG
ggagcagagggggatgtgat

SEQ ID NO: 78158 - DNA, 20 bp, Artificial Sequence
  Description of Artificial Sequence: Synthetic oligonucleotide
  Target: SCNA; (+) strand; PAM type: YTN; PAM sequence: CTG
gtttctttcttaaaagaatt

SEQ ID NO: 78159 - DNA, 20 bp, Artificial Sequence
  Description of Artificial Sequence: Synthetic oligonucleotide
  Target: SCNA; (+) strand; PAM type: YTN; PAM sequence: TTT
ctttcttaaaagaattattc

SEQ ID NO: 78160 - DNA, 20 bp, Artificial Sequence
  Description of Artificial Sequence: Synthetic oligonucleotide
  Target: SCNA; (+) strand; PAM type: YTN; PAM sequence: TTC
tttcttaaaagaattattcc

SEQ ID NO: 78161 - DNA, 20 bp, Artificial Sequence
  Description of Artificial Sequence: Synthetic oligonucleotide
  Target: SCNA; (+) strand; PAM type: YTN; PAM sequence: CTT
tcttaaaagaattattccga

SEQ ID NO: 78162 - DNA, 20 bp, Artificial Sequence
  Description of Artificial Sequence: Synthetic oligonucleotide
  Target: SCNA; (+) strand; PAM type: YTN; PAM sequence: TTT
cttaaaagaattattccgac

SEQ ID NO: 78163 - DNA, 20 bp, Artificial Sequence
  Description of Artificial Sequence: Synthetic oligonucleotide
  Target: SCNA; (+) strand; PAM type: YTN; PAM sequence: TTC
ttaaaagaattattccgact

SEQ ID NO: 78164 - DNA, 20 bp, Artificial Sequence
  Description of Artificial Sequence: Synthetic oligonucleotide
  Target: SCNA; (+) strand; PAM type: YTN; PAM sequence: CTT
aaaagaattattccgactgc

SEQ ID NO: 78165 - DNA, 20 bp, Artificial Sequence
  Description of Artificial Sequence: Synthetic oligonucleotide
  Target: SCNA; (+) strand; PAM type: YTN; PAM sequence: TTA
aaagaattattccgactgct

SEQ ID NO: 78166 - DNA, 20 bp, Artificial Sequence
  Description of Artificial Sequence: Synthetic oligonucleotide
  Target: SCNA; (+) strand; PAM type: YTN; PAM sequence: TTA
ttccgactgctcaagaatgg

SEQ ID NO: 78167 - DNA, 20 bp, Artificial Sequence
  Description of Artificial Sequence: Synthetic oligonucleotide
  Target: SCNA; (+) strand; PAM type: YTN; PAM sequence: TTC
cgactgctcaagaatggact

SEQ ID NO: 78168 - DNA, 20 bp, Artificial Sequence
  Description of Artificial Sequence: Synthetic oligonucleotide
  Target: SCNA; (+) strand; PAM type: YTN; PAM sequence: CTG
ctcaagaatggactaggttg

SEQ ID NO: 78169 - DNA, 20 bp, Artificial Sequence
  Description of Artificial Sequence: Synthetic oligonucleotide
  Target: SCNA; (+) strand; PAM type: YTN; PAM sequence: CTC
aagaatggactaggttgggt

SEQ ID NO: 78170 - DNA, 20 bp, Artificial Sequence
  Description of Artificial Sequence: Synthetic oligonucleotide
  Target: SCNA; (+) strand; PAM type: YTN; PAM sequence: CTA
ggttgggtgtctaagtggaa

SEQ ID NO: 78171 - DNA, 20 bp, Artificial Sequence
  Description of Artificial Sequence: Synthetic oligonucleotide
  Target: SCNA; (+) strand; PAM type: YTN; PAM sequence: TTG
ggtgtctaagtggaagcagg

SEQ ID NO: 78172 - DNA, 20 bp, Artificial Sequence
  Description of Artificial Sequence: Synthetic oligonucleotide
  Target: SCNA; (+) strand; PAM type: YTN; PAM sequence: CTA
agtggaagcaggcagatcag

SEQ ID NO: 78173 - DNA, 20 bp, Artificial Sequence
  Description of Artificial Sequence: Synthetic oligonucleotide
  Target: SCNA; (+) strand; PAM type: YTN; PAM sequence: TTC
agaggttagggaaggagtcc

SEQ ID NO: 78174 - DNA, 20 bp, Artificial Sequence
  Description of Artificial Sequence: Synthetic oligonucleotide
  Target: SCNA; (+) strand; PAM type: YTN; PAM sequence: TTA
gggaaggagtccaggtgaga

SEQ ID NO: 78175 - DNA, 20 bp, Artificial Sequence
  Description of Artificial Sequence: Synthetic oligonucleotide
  Target: SCNA; (+) strand; PAM type: YTN; PAM sequence: CTA
gcctagggtggtaacagtag

SEQ ID NO: 78176 - DNA, 20 bp, Artificial Sequence
  Description of Artificial Sequence: Synthetic oligonucleotide
  Target: SCNA; (+) strand; PAM type: YTN; PAM sequence: CTA
gggtggtaacagtagagaag

SEQ ID NO: 78177 - DNA, 20 bp, Artificial Sequence
  Description of Artificial Sequence: Synthetic oligonucleotide
  Target: SCNA; (+) strand; PAM type: YTN; PAM sequence: CTG
gggatacattttgaattaca

SEQ ID NO: 78178 - DNA, 20 bp, Artificial Sequence
  Description of Artificial Sequence: Synthetic oligonucleotide
  Target: SCNA; (+) strand; PAM type: YTN; PAM sequence: TTT
tgaattacagtgtaggtaaa

SEQ ID NO: 78179 - DNA, 20 bp, Artificial Sequence
  Description of Artificial Sequence: Synthetic oligonucleotide
  Target: SCNA; (+) strand; PAM type: YTN; PAM sequence: TTT
gaattacagtgtaggtaaaa

SEQ ID NO: 78180 - DNA, 20 bp, Artificial Sequence
  Description of Artificial Sequence: Synthetic oligonucleotide
  Target: SCNA; (+) strand; PAM type: YTN; PAM sequence: TTG
aattacagtgtaggtaaaat

SEQ ID NO: 78181 - DNA, 20 bp, Artificial Sequence
  Description of Artificial Sequence: Synthetic oligonucleotide
  Target: SCNA; (+) strand; PAM type: YTN; PAM sequence: TTA
cagtgtaggtaaaattatta

SEQ ID NO: 78182 - DNA, 20 bp, Artificial Sequence
  Description of Artificial Sequence: Synthetic oligonucleotide
  Target: SCNA; (+) strand; PAM type: YTN; PAM sequence: TTA
ttagcttaagggttagatat

SEQ ID NO: 78183 - DNA, 20 bp, Artificial Sequence
  Description of Artificial Sequence: Synthetic oligonucleotide
  Target: SCNA; (+) strand; PAM type: YTN; PAM sequence: TTA
gcttaagggttagatataaa

SEQ ID NO: 78184 - DNA, 20 bp, Artificial Sequence
  Description of Artificial Sequence: Synthetic oligonucleotide
  Target: SCNA; (+) strand; PAM type: YTN; PAM sequence: CTT
aagggttagatataaaaggt

SEQ ID NO: 78185 - DNA, 20 bp, Artificial Sequence
  Description of Artificial Sequence: Synthetic oligonucleotide
  Target: SCNA; (+) strand; PAM type: YTN; PAM sequence: TTA
agggttagatataaaaggta

SEQ ID NO: 78186 - DNA, 20 bp, Artificial Sequence
  Description of Artificial Sequence: Synthetic oligonucleotide
  Target: SCNA; (+) strand; PAM type: YTN; PAM sequence: TTA
gatataaaaggtatgaaagg

SEQ ID NO: 78187 - DNA, 20 bp, Artificial Sequence
  Description of Artificial Sequence: Synthetic oligonucleotide
  Target: SCNA; (+) strand; PAM type: YTN; PAM sequence: CTG
caaatgctaggagaccaaag

SEQ ID NO: 78188 - DNA, 20 bp, Artificial Sequence
  Description of Artificial Sequence: Synthetic oligonucleotide
  Target: SCNA; (+) strand; PAM type: YTN; PAM sequence: CTA
ggagaccaaagtgaaatttc

SEQ ID NO: 78189 - DNA, 20 bp, Artificial Sequence
  Description of Artificial Sequence: Synthetic oligonucleotide
  Target: SCNA; (+) strand; PAM type: YTN; PAM sequence: TTT
cacatagtgaaattactgtg

SEQ ID NO: 78190 - DNA, 20 bp, Artificial Sequence
  Description of Artificial Sequence: Synthetic oligonucleotide
  Target: SCNA; (+) strand; PAM type: YTN; PAM sequence: TTC
acatagtgaaattactgtgt

SEQ ID NO: 78191 - DNA, 20 bp, Artificial Sequence
  Description of Artificial Sequence: Synthetic oligonucleotide
  Target: SCNA; (+) strand; PAM type: YTN; PAM sequence: TTA
ctgtgtttcagcagttaggg

SEQ ID NO: 78192 - DNA, 20 bp, Artificial Sequence
  Description of Artificial Sequence: Synthetic oligonucleotide
  Target: SCNA; (+) strand; PAM type: YTN; PAM sequence: CTG
tgtttcagcagttagggata

SEQ ID NO: 78193 - DNA, 20 bp, Artificial Sequence
  Description of Artificial Sequence: Synthetic oligonucleotide
  Target: SCNA; (+) strand; PAM type: YTN; PAM sequence: TTT
cagcagttagggataacttt

SEQ ID NO: 78194 - DNA, 20 bp, Artificial Sequence
  Description of Artificial Sequence: Synthetic oligonucleotide
  Target: SCNA; (+) strand; PAM type: YTN; PAM sequence: TTC
agcagttagggataactttt

SEQ ID NO: 78195 - DNA, 20 bp, Artificial Sequence
  Description of Artificial Sequence: Synthetic oligonucleotide
  Target: SCNA; (+) strand; PAM type: YTN; PAM sequence: TTA
gggataactttttggagttc

SEQ ID NO: 78196 - DNA, 20 bp, Artificial Sequence
  Description of Artificial Sequence: Synthetic oligonucleotide
  Target: SCNA; (+) strand; PAM type: YTN; PAM sequence: CTT
tttggagttctggaggcttg

SEQ ID NO: 78197 - DNA, 20 bp, Artificial Sequence
  Description of Artificial Sequence: Synthetic oligonucleotide
  Target: SCNA; (+) strand; PAM type: YTN; PAM sequence: TTT
ttggagttctggaggcttgg

SEQ ID NO: 78198 - DNA, 20 bp, Artificial Sequence
  Description of Artificial Sequence: Synthetic oligonucleotide
  Target: SCNA; (+) strand; PAM type: YTN; PAM sequence: TTT
tggagttctggaggcttggg

SEQ ID NO: 78199 - DNA, 20 bp, Artificial Sequence
  Description of Artificial Sequence: Synthetic oligonucleotide
  Target: SCNA; (+) strand; PAM type: YTN; PAM sequence: TTT
ggagttctggaggcttgggc

SEQ ID NO: 78200 - DNA, 20 bp, Artificial Sequence
  Description of Artificial Sequence: Synthetic oligonucleotide
  Target: SCNA; (+) strand; PAM type: YTN; PAM sequence: TTG
gagttctggaggcttgggct

SEQ ID NO: 78201 - DNA, 20 bp, Artificial Sequence
  Description of Artificial Sequence: Synthetic oligonucleotide
  Target: SCNA; (+) strand; PAM type: YTN; PAM sequence: TTC
tggaggcttgggctggactt

SEQ ID NO: 78202 - DNA, 20 bp, Artificial Sequence
  Description of Artificial Sequence: Synthetic oligonucleotide
  Target: SCNA; (+) strand; PAM type: YTN; PAM sequence: CTG
gaggcttgggctggactttt

SEQ ID NO: 78203 - DNA, 20 bp, Artificial Sequence
  Description of Artificial Sequence: Synthetic oligonucleotide
  Target: SCNA; (+) strand; PAM type: YTN; PAM sequence: CTT
gggctggacttttttgcatg

SEQ ID NO: 78204 - DNA, 20 bp, Artificial Sequence
  Description of Artificial Sequence: Synthetic oligonucleotide
  Target: SCNA; (+) strand; PAM type: YTN; PAM sequence: TTG
ggctggacttttttgcatgg

SEQ ID NO: 78205 - DNA, 20 bp, Artificial Sequence
  Description of Artificial Sequence: Synthetic oligonucleotide
  Target: SCNA; (+) strand; PAM type: YTN; PAM sequence: CTG
gacttttttgcatggataaa

SEQ ID NO: 78206 - DNA, 20 bp, Artificial Sequence
  Description of Artificial Sequence: Synthetic oligonucleotide
  Target: SCNA; (+) strand; PAM type: YTN; PAM sequence: CTT
ttttgcatggataaaattca

SEQ ID NO: 78207 - DNA, 20 bp, Artificial Sequence
  Description of Artificial Sequence: Synthetic oligonucleotide
  Target: SCNA; (+) strand; PAM type: YTN; PAM sequence: TTT
tttgcatggataaaattcag

SEQ ID NO: 78208 - DNA, 20 bp, Artificial Sequence
  Description of Artificial Sequence: Synthetic oligonucleotide
  Target: SCNA; (+) strand; PAM type: YTN; PAM sequence: TTT
ttgcatggataaaattcaga

SEQ ID NO: 78209 - DNA, 20 bp, Artificial Sequence
  Description of Artificial Sequence: Synthetic oligonucleotide
  Target: SCNA; (+) strand; PAM type: YTN; PAM sequence: TTT
tgcatggataaaattcagac

SEQ ID NO: 78210 - DNA, 20 bp, Artificial Sequence
  Description of Artificial Sequence: Synthetic oligonucleotide
  Target: SCNA; (+) strand; PAM type: YTN; PAM sequence: TTT
gcatggataaaattcagaca

SEQ ID NO: 78211 - DNA, 20 bp, Artificial Sequence
  Description of Artificial Sequence: Synthetic oligonucleotide
  Target: SCNA; (+) strand; PAM type: YTN; PAM sequence: TTG
catggataaaattcagacag

SEQ ID NO: 78212 - DNA, 20 bp, Artificial Sequence
  Description of Artificial Sequence: Synthetic oligonucleotide
  Target: SCNA; (+) strand; PAM type: YTN; PAM sequence: TTC
agacaggagacataaaagcc

SEQ ID NO: 78213 - DNA, 20 bp, Artificial Sequence
  Description of Artificial Sequence: Synthetic oligonucleotide
  Target: SCNA; (+) strand; PAM type: YTN; PAM sequence: CTT
cttagtggtaagacagttat

SEQ ID NO: 78214 - DNA, 20 bp, Artificial Sequence
  Description of Artificial Sequence: Synthetic oligonucleotide
  Target: SCNA; (+) strand; PAM type: YTN; PAM sequence: TTC
ttagtggtaagacagttatt

SEQ ID NO: 78215 - DNA, 20 bp, Artificial Sequence
  Description of Artificial Sequence: Synthetic oligonucleotide
  Target: SCNA; (+) strand; PAM type: YTN; PAM sequence: CTT
agtggtaagacagttattag

SEQ ID NO: 78216 - DNA, 20 bp, Artificial Sequence
  Description of Artificial Sequence: Synthetic oligonucleotide
  Target: SCNA; (+) strand; PAM type: YTN; PAM sequence: TTA
gtggtaagacagttattaga

SEQ ID NO: 78217 - DNA, 20 bp, Artificial Sequence
  Description of Artificial Sequence: Synthetic oligonucleotide
  Target: SCNA; (+) strand; PAM type: YTN; PAM sequence: TTA
ttagataattgggaagtatt

SEQ ID NO: 78218 - DNA, 20 bp, Artificial Sequence
  Description of Artificial Sequence: Synthetic oligonucleotide
  Target: SCNA; (+) strand; PAM type: YTN; PAM sequence: TTA
gataattgggaagtattttg

SEQ ID NO: 78219 - DNA, 20 bp, Artificial Sequence
  Description of Artificial Sequence: Synthetic oligonucleotide
  Target: SCNA; (+) strand; PAM type: YTN; PAM sequence: TTG
ggaagtattttgaagatact

SEQ ID NO: 78220 - DNA, 20 bp, Artificial Sequence
  Description of Artificial Sequence: Synthetic oligonucleotide
  Target: SCNA; (+) strand; PAM type: YTN; PAM sequence: TTT
tgaagatacttgtctaccta

SEQ ID NO: 78221 - DNA, 20 bp, Artificial Sequence
  Description of Artificial Sequence: Synthetic oligonucleotide
  Target: SCNA; (+) strand; PAM type: YTN; PAM sequence: TTT
gaagatacttgtctacctag

SEQ ID NO: 78222 - DNA, 20 bp, Artificial Sequence
  Description of Artificial Sequence: Synthetic oligonucleotide
  Target: SCNA; (+) strand; PAM type: YTN; PAM sequence: TTG
aagatacttgtctacctaga

SEQ ID NO: 78223 - DNA, 20 bp, Artificial Sequence
  Description of Artificial Sequence: Synthetic oligonucleotide
  Target: SCNA; (+) strand; PAM type: YTN; PAM sequence: CTT
gtctacctagaatgaagaat

SEQ ID NO: 78224 - DNA, 20 bp, Artificial Sequence
  Description of Artificial Sequence: Synthetic oligonucleotide
  Target: SCNA; (+) strand; PAM type: YTN; PAM sequence: TTG
tctacctagaatgaagaatt

SEQ ID NO: 78225 - DNA, 20 bp, Artificial Sequence
  Description of Artificial Sequence: Synthetic oligonucleotide
  Target: SCNA; (+) strand; PAM type: YTN; PAM sequence: CTA
cctagaatgaagaattttgt

SEQ ID NO: 78226 - DNA, 20 bp, Artificial Sequence
  Description of Artificial Sequence: Synthetic oligonucleotide
  Target: SCNA; (+) strand; PAM type: YTN; PAM sequence: CTA
gaatgaagaattttgttgag

SEQ ID NO: 78227 - DNA, 20 bp, Artificial Sequence
  Description of Artificial Sequence: Synthetic oligonucleotide
  Target: SCNA; (+) strand; PAM type: YTN; PAM sequence: TTT
tgttgagtatttgagagcta

SEQ ID NO: 78228 - DNA, 20 bp, Artificial Sequence
  Description of Artificial Sequence: Synthetic oligonucleotide
  Target: SCNA; (+) strand; PAM type: YTN; PAM sequence: TTT
gttgagtatttgagagctat

SEQ ID NO: 78229 - DNA, 20 bp, Artificial Sequence
  Description of Artificial Sequence: Synthetic oligonucleotide
  Target: SCNA; (+) strand; PAM type: YTN; PAM sequence: TTG
ttgagtatttgagagctata

SEQ ID NO: 78230 - DNA, 20 bp, Artificial Sequence
  Description of Artificial Sequence: Synthetic oligonucleotide
  Target: SCNA; (+) strand; PAM type: YTN; PAM sequence: TTG
agtatttgagagctatatgg

SEQ ID NO: 78231 - DNA, 20 bp, Artificial Sequence
  Description of Artificial Sequence: Synthetic oligonucleotide
  Target: SCNA; (+) strand; PAM type: YTN; PAM sequence: TTT
gagagctatatggctgaaaa

SEQ ID NO: 78232 - DNA, 20 bp, Artificial Sequence
  Description of Artificial Sequence: Synthetic oligonucleotide
  Target: SCNA; (+) strand; PAM type: YTN; PAM sequence: TTG
agagctatatggctgaaaag

SEQ ID NO: 78233 - DNA, 20 bp, Artificial Sequence
  Description of Artificial Sequence: Synthetic oligonucleotide
  Target: SCNA; (+) strand; PAM type: YTN; PAM sequence: CTA
tatggctgaaaagaaagagg

SEQ ID NO: 78234 - DNA, 20 bp, Artificial Sequence
  Description of Artificial Sequence: Synthetic oligonucleotide
  Target: SCNA; (+) strand; PAM type: YTN; PAM sequence: CTG
aaaagaaagaggccagataa

SEQ ID NO: 78235 - DNA, 20 bp, Artificial Sequence
  Description of Artificial Sequence: Synthetic oligonucleotide
  Target: SCNA; (+) strand; PAM type: YTN; PAM sequence: CTG
agtaacaagagtaggccttg

SEQ ID NO: 78236 - DNA, 20 bp, Artificial Sequence
  Description of Artificial Sequence: Synthetic oligonucleotide
  Target: SCNA; (+) strand; PAM type: YTN; PAM sequence: CTT
gggccttgattctatagaga

SEQ ID NO: 78237 - DNA, 20 bp, Artificial Sequence
  Description of Artificial Sequence: Synthetic oligonucleotide
  Target: SCNA; (+) strand; PAM type: YTN; PAM sequence: TTG
ggccttgattctatagagag

SEQ ID NO: 78238 - DNA, 20 bp, Artificial Sequence
  Description of Artificial Sequence: Synthetic oligonucleotide
  Target: SCNA; (+) strand; PAM type: YTN; PAM sequence: CTT
gattctatagagagtgcaaa

SEQ ID NO: 78239 - DNA, 20 bp, Artificial Sequence
  Description of Artificial Sequence: Synthetic oligonucleotide
  Target: SCNA; (+) strand; PAM type: YTN; PAM sequence: TTG
attctatagagagtgcaaaa

SEQ ID NO: 78240 - DNA, 20 bp, Artificial Sequence
  Description of Artificial Sequence: Synthetic oligonucleotide
  Target: SCNA; (+) strand; PAM type: YTN; PAM sequence: TTC
tatagagagtgcaaaaccac

SEQ ID NO: 78241 - DNA, 20 bp, Artificial Sequence
  Description of Artificial Sequence: Synthetic oligonucleotide
  Target: SCNA; (+) strand; PAM type: YTN; PAM sequence: CTA
tagagagtgcaaaaccactg

SEQ ID NO: 78242 - DNA, 20 bp, Artificial Sequence
  Description of Artificial Sequence: Synthetic oligonucleotide
  Target: SCNA; (+) strand; PAM type: YTN; PAM sequence: CTG
gctaattttttgtaactaat

SEQ ID NO: 78243 - DNA, 20 bp, Artificial Sequence
  Description of Artificial Sequence: Synthetic oligonucleotide
  Target: SCNA; (+) strand; PAM type: YTN; PAM sequence: CTA
attttttgtaactaatctgg

SEQ ID NO: 78244 - DNA, 20 bp, Artificial Sequence
  Description of Artificial Sequence: Synthetic oligonucleotide
  Target: SCNA; (+) strand; PAM type: YTN; PAM sequence: TTT
tttgtaactaatctggctag

SEQ ID NO: 78245 - DNA, 20 bp, Artificial Sequence
  Description of Artificial Sequence: Synthetic oligonucleotide
  Target: SCNA; (+) strand; PAM type: YTN; PAM sequence: TTT
ttgtaactaatctggctaga

SEQ ID NO: 78246 - DNA, 20 bp, Artificial Sequence
  Description of Artificial Sequence: Synthetic oligonucleotide
  Target: SCNA; (+) strand; PAM type: YTN; PAM sequence: TTT
tgtaactaatctggctagaa

SEQ ID NO: 78247 - DNA, 20 bp, Artificial Sequence
  Description of Artificial Sequence: Synthetic oligonucleotide
  Target: SCNA; (+) strand; PAM type: YTN; PAM sequence: TTT
gtaactaatctggctagaaa

SEQ ID NO: 78248 - DNA, 20 bp, Artificial Sequence
  Description of Artificial Sequence: Synthetic oligonucleotide
  Target: SCNA; (+) strand; PAM type: YTN; PAM sequence: TTG
taactaatctggctagaaat

SEQ ID NO: 78249 - DNA, 20 bp, Artificial Sequence
  Description of Artificial Sequence: Synthetic oligonucleotide
  Target: SCNA; (+) strand; PAM type: YTN; PAM sequence: CTA
atctggctagaaatttccag

SEQ ID NO: 78250 - DNA, 20 bp, Artificial Sequence
  Description of Artificial Sequence: Synthetic oligonucleotide
  Target: SCNA; (+) strand; PAM type: YTN; PAM sequence: CTG
gctagaaatttccagatttc

SEQ ID NO: 78251 - DNA, 20 bp, Artificial Sequence
  Description of Artificial Sequence: Synthetic oligonucleotide
  Target: SCNA; (+) strand; PAM type: YTN; PAM sequence: CTA
gaaatttccagatttccagc

SEQ ID NO: 78252 - DNA, 20 bp, Artificial Sequence
  Description of Artificial Sequence: Synthetic oligonucleotide
  Target: SCNA; (+) strand; PAM type: YTN; PAM sequence: TTT
ccagatttccagcacactat

SEQ ID NO: 78253 - DNA, 20 bp, Artificial Sequence
  Description of Artificial Sequence: Synthetic oligonucleotide
  Target: SCNA; (+) strand; PAM type: YTN; PAM sequence: TTC
cagatttccagcacactata

SEQ ID NO: 78254 - DNA, 20 bp, Artificial Sequence
  Description of Artificial Sequence: Synthetic oligonucleotide
  Target: SCNA; (+) strand; PAM type: YTN; PAM sequence: TTT
ccagcacactatattaaagg

SEQ ID NO: 78255 - DNA, 20 bp, Artificial Sequence
  Description of Artificial Sequence: Synthetic oligonucleotide
  Target: SCNA; (+) strand; PAM type: YTN; PAM sequence: TTC
cagcacactatattaaagga

SEQ ID NO: 78256 - DNA, 20 bp, Artificial Sequence
  Description of Artificial Sequence: Synthetic oligonucleotide
  Target: SCNA; (+) strand; PAM type: YTN; PAM sequence: CTA
tattaaaggaagtactgcca

SEQ ID NO: 78257 - DNA, 20 bp, Artificial Sequence
  Description of Artificial Sequence: Synthetic oligonucleotide
  Target: SCNA; (+) strand; PAM type: YTN; PAM sequence: TTA
aaggaagtactgccaaaaaa

SEQ ID NO: 78258 - DNA, 20 bp, Artificial Sequence
  Description of Artificial Sequence: Synthetic oligonucleotide
  Target: SCNA; (+) strand; PAM type: YTN; PAM sequence: CTG
ccaaaaaacatttcatggat

SEQ ID NO: 78259 - DNA, 20 bp, Artificial Sequence
  Description of Artificial Sequence: Synthetic oligonucleotide
  Target: SCNA; (+) strand; PAM type: YTN; PAM sequence: TTT
catggattccaaaaatagag

SEQ ID NO: 78260 - DNA, 20 bp, Artificial Sequence
  Description of Artificial Sequence: Synthetic oligonucleotide
  Target: SCNA; (+) strand; PAM type: YTN; PAM sequence: TTC
atggattccaaaaatagaga

SEQ ID NO: 78261 - DNA, 20 bp, Artificial Sequence
  Description of Artificial Sequence: Synthetic oligonucleotide
  Target: SCNA; (+) strand; PAM type: YTN; PAM sequence: TTC
caaaaatagagatcaatgta

SEQ ID NO: 78262 - DNA, 20 bp, Artificial Sequence
  Description of Artificial Sequence: Synthetic oligonucleotide
  Target: SCNA; (+) strand; PAM type: YTN; PAM sequence: TTT
ataagatgaatgaactctgg

SEQ ID NO: 78263 - DNA, 20 bp, Artificial Sequence
  Description of Artificial Sequence: Synthetic oligonucleotide
  Target: SCNA; (+) strand; PAM type: YTN; PAM sequence: TTA
taagatgaatgaactctggg

SEQ ID NO: 78264 - DNA, 20 bp, Artificial Sequence
  Description of Artificial Sequence: Synthetic oligonucleotide
  Target: SCNA; (+) strand; PAM type: YTN; PAM sequence: CTC
tgggaagaccaagcagattt

SEQ ID NO: 78265 - DNA, 20 bp, Artificial Sequence
  Description of Artificial Sequence: Synthetic oligonucleotide
  Target: SCNA; (+) strand; PAM type: YTN; PAM sequence: CTG
ggaagaccaagcagatttct

SEQ ID NO: 78266 - DNA, 20 bp, Artificial Sequence
  Description of Artificial Sequence: Synthetic oligonucleotide
  Target: SCNA; (+) strand; PAM type: YTN; PAM sequence: TTT
ctgaaacaacactaccatat

SEQ ID NO: 78267 - DNA, 20 bp, Artificial Sequence
  Description of Artificial Sequence: Synthetic oligonucleotide
  Target: SCNA; (+) strand; PAM type: YTN; PAM sequence: TTC
tgaaacaacactaccatata

SEQ ID NO: 78268 - DNA, 20 bp, Artificial Sequence
  Description of Artificial Sequence: Synthetic oligonucleotide
  Target: SCNA; (+) strand; PAM type: YTN; PAM sequence: CTG
aaacaacactaccatatatt

SEQ ID NO: 78269 - DNA, 20 bp, Artificial Sequence
  Description of Artificial Sequence: Synthetic oligonucleotide
  Target: SCNA; (+) strand; PAM type: YTN; PAM sequence: CTA
ccatatatttcattatatac

SEQ ID NO: 78270 - DNA, 20 bp, Artificial Sequence
  Description of Artificial Sequence: Synthetic oligonucleotide
  Target: SCNA; (+) strand; PAM type: YTN; PAM sequence: TTT
cattatatacacacacagct

SEQ ID NO: 78271 - DNA, 20 bp, Artificial Sequence
  Description of Artificial Sequence: Synthetic oligonucleotide
  Target: SCNA; (+) strand; PAM type: YTN; PAM sequence: TTC
attatatacacacacagcta

SEQ ID NO: 78272 - DNA, 20 bp, Artificial Sequence
  Description of Artificial Sequence: Synthetic oligonucleotide
  Target: SCNA; (+) strand; PAM type: YTN; PAM sequence: TTA
tatacacacacagctacaca

SEQ ID NO: 78273 - DNA, 20 bp, Artificial Sequence
  Description of Artificial Sequence: Synthetic oligonucleotide
  Target: SCNA; (+) strand; PAM type: YTN; PAM sequence: CTA
cacacacacacacacacaca

SEQ ID NO: 78274 - DNA, 20 bp, Artificial Sequence
  Description of Artificial Sequence: Synthetic oligonucleotide
  Target: SCNA; (+) strand; PAM type: YTN; PAM sequence: CTG
aacataccctacaccctaca

SEQ ID NO: 78275 - DNA, 20 bp, Artificial Sequence
  Description of Artificial Sequence: Synthetic oligonucleotide
  Target: SCNA; (+) strand; PAM type: YTN; PAM sequence: CTA
caccctacataatacttata

SEQ ID NO: 78276 - DNA, 20 bp, Artificial Sequence
  Description of Artificial Sequence: Synthetic oligonucleotide
  Target: SCNA; (+) strand; PAM type: YTN; PAM sequence: CTA
cataatacttatatatacac

SEQ ID NO: 78277 - DNA, 20 bp, Artificial Sequence
  Description of Artificial Sequence: Synthetic oligonucleotide
  Target: SCNA; (+) strand; PAM type: YTN; PAM sequence: CTT
atatatacacgttagtgctc

SEQ ID NO: 78278 - DNA, 20 bp, Artificial Sequence
  Description of Artificial Sequence: Synthetic oligonucleotide
  Target: SCNA; (+) strand; PAM type: YTN; PAM sequence: TTA
tatatacacgttagtgctct

SEQ ID NO: 78279 - DNA, 20 bp, Artificial Sequence
  Description of Artificial Sequence: Synthetic oligonucleotide
  Target: SCNA; (+) strand; PAM type: YTN; PAM sequence: TTA
gtgctctgcagttaattttt

SEQ ID NO: 78280 - DNA, 20 bp, Artificial Sequence
  Description of Artificial Sequence: Synthetic oligonucleotide
  Target: SCNA; (+) strand; PAM type: YTN; PAM sequence: CTC
tgcagttaatttttataaag

SEQ ID NO: 78281 - DNA, 20 bp, Artificial Sequence
  Description of Artificial Sequence: Synthetic oligonucleotide
  Target: SCNA; (+) strand; PAM type: YTN; PAM sequence: CTG
cagttaatttttataaaggc

SEQ ID NO: 78282 - DNA, 20 bp, Artificial Sequence
  Description of Artificial Sequence: Synthetic oligonucleotide
  Target: SCNA; (+) strand; PAM type: YTN; PAM sequence: TTA
atttttataaaggcaccaat

SEQ ID NO: 78283 - DNA, 20 bp, Artificial Sequence
  Description of Artificial Sequence: Synthetic oligonucleotide
  Target: SCNA; (+) strand; PAM type: YTN; PAM sequence: TTT
ttataaaggcaccaattagt

SEQ ID NO: 78284 - DNA, 20 bp, Artificial Sequence
  Description of Artificial Sequence: Synthetic oligonucleotide
  Target: SCNA; (+) strand; PAM type: YTN; PAM sequence: TTT
tataaaggcaccaattagtt

SEQ ID NO: 78285 - DNA, 20 bp, Artificial Sequence
  Description of Artificial Sequence: Synthetic oligonucleotide
  Target: SCNA; (+) strand; PAM type: YTN; PAM sequence: TTT
ataaaggcaccaattagttt

SEQ ID NO: 78286 - DNA, 20 bp, Artificial Sequence
  Description of Artificial Sequence: Synthetic oligonucleotide
  Target: SCNA; (+) strand; PAM type: YTN; PAM sequence: TTA
taaaggcaccaattagtttc

SEQ ID NO: 78287 - DNA, 20 bp, Artificial Sequence
  Description of Artificial Sequence: Synthetic oligonucleotide
  Target: SCNA; (+) strand; PAM type: YTN; PAM sequence: TTA
gtttctaataagaaaaagaa

SEQ ID NO: 78288 - DNA, 20 bp, Artificial Sequence
  Description of Artificial Sequence: Synthetic oligonucleotide
  Target: SCNA; (+) strand; PAM type: YTN; PAM sequence: TTT
ctaataagaaaaagaaatgt

SEQ ID NO: 78289 - DNA, 20 bp, Artificial Sequence
  Description of Artificial Sequence: Synthetic oligonucleotide
  Target: SCNA; (+) strand; PAM type: YTN; PAM sequence: TTC
taataagaaaaagaaatgtg

SEQ ID NO: 78290 - DNA, 20 bp, Artificial Sequence
  Description of Artificial Sequence: Synthetic oligonucleotide
  Target: SCNA; (+) strand; PAM type: YTN; PAM sequence: CTA
ataagaaaaagaaatgtgta

SEQ ID NO: 78291 - DNA, 20 bp, Artificial Sequence
  Description of Artificial Sequence: Synthetic oligonucleotide
  Target: SCNA; (+) strand; PAM type: YTN; PAM sequence: TTT
cattctctccatgaagaata

SEQ ID NO: 78292 - DNA, 20 bp, Artificial Sequence
  Description of Artificial Sequence: Synthetic oligonucleotide
  Target: SCNA; (+) strand; PAM type: YTN; PAM sequence: TTC
attctctccatgaagaataa

SEQ ID NO: 78293 - DNA, 20 bp, Artificial Sequence
  Description of Artificial Sequence: Synthetic oligonucleotide
  Target: SCNA; (+) strand; PAM type: YTN; PAM sequence: TTC
tctccatgaagaataaaaaa

SEQ ID NO: 78294 - DNA, 20 bp, Artificial Sequence
  Description of Artificial Sequence: Synthetic oligonucleotide
  Target: SCNA; (+) strand; PAM type: YTN; PAM sequence: CTC
tccatgaagaataaaaaaca

SEQ ID NO: 78295 - DNA, 20 bp, Artificial Sequence
  Description of Artificial Sequence: Synthetic oligonucleotide
  Target: SCNA; (+) strand; PAM type: YTN; PAM sequence: CTC
catgaagaataaaaaacaca

SEQ ID NO: 78296 - DNA, 20 bp, Artificial Sequence
  Description of Artificial Sequence: Synthetic oligonucleotide
  Target: SCNA; (+) strand; PAM type: YTN; PAM sequence: TTT
gttagctgtaacaaatatac

SEQ ID NO: 78297 - DNA, 20 bp, Artificial Sequence
  Description of Artificial Sequence: Synthetic oligonucleotide
  Target: SCNA; (+) strand; PAM type: YTN; PAM sequence: TTG
ttagctgtaacaaatataca

SEQ ID NO: 78298 - DNA, 20 bp, Artificial Sequence
  Description of Artificial Sequence: Synthetic oligonucleotide
  Target: SCNA; (+) strand; PAM type: YTN; PAM sequence: TTA
gctgtaacaaatatacattt

SEQ ID NO: 78299 - DNA, 20 bp, Artificial Sequence
  Description of Artificial Sequence: Synthetic oligonucleotide
  Target: SCNA; (+) strand; PAM type: YTN; PAM sequence: CTG
taacaaatatacattttttt

SEQ ID NO: 78300 - DNA, 20 bp, Artificial Sequence
  Description of Artificial Sequence: Synthetic oligonucleotide
  Target: SCNA; (+) strand; PAM type: YTN; PAM sequence: TTT
ttttctcaaatcatttcatg

SEQ ID NO: 78301 - DNA, 20 bp, Artificial Sequence
  Description of Artificial Sequence: Synthetic oligonucleotide
  Target: SCNA; (+) strand; PAM type: YTN; PAM sequence: TTT
tttctcaaatcatttcatga

SEQ ID NO: 78302 - DNA, 20 bp, Artificial Sequence
  Description of Artificial Sequence: Synthetic oligonucleotide
  Target: SCNA; (+) strand; PAM type: YTN; PAM sequence: TTT
ttctcaaatcatttcatgat

SEQ ID NO: 78303 - DNA, 20 bp, Artificial Sequence
  Description of Artificial Sequence: Synthetic oligonucleotide
  Target: SCNA; (+) strand; PAM type: YTN; PAM sequence: TTT
tctcaaatcatttcatgata

SEQ ID NO: 78304 - DNA, 20 bp, Artificial Sequence
  Description of Artificial Sequence: Synthetic oligonucleotide
  Target: SCNA; (+) strand; PAM type: YTN; PAM sequence: TTT
ctcaaatcatttcatgatat

SEQ ID NO: 78305 - DNA, 20 bp, Artificial Sequence
  Description of Artificial Sequence: Synthetic oligonucleotide
  Target: SCNA; (+) strand; PAM type: YTN; PAM sequence: TTC
tcaaatcatttcatgatatt

SEQ ID NO: 78306 - DNA, 20 bp, Artificial Sequence
  Description of Artificial Sequence: Synthetic oligonucleotide
  Target: SCNA; (+) strand; PAM type: YTN; PAM sequence: CTC
aaatcatttcatgatattta

SEQ ID NO: 78307 - DNA, 20 bp, Artificial Sequence
  Description of Artificial Sequence: Synthetic oligonucleotide
  Target: SCNA; (+) strand; PAM type: YTN; PAM sequence: TTT
catgatatttatcacatgaa

SEQ ID NO: 78308 - DNA, 20 bp, Artificial Sequence
  Description of Artificial Sequence: Synthetic oligonucleotide
  Target: SCNA; (+) strand; PAM type: YTN; PAM sequence: TTC
atgatatttatcacatgaaa

SEQ ID NO: 78309 - DNA, 20 bp, Artificial Sequence
  Description of Artificial Sequence: Synthetic oligonucleotide
  Target: SCNA; (+) strand; PAM type: YTN; PAM sequence: TTT
atcacatgaaaaatgggtac

SEQ ID NO: 78310 - DNA, 20 bp, Artificial Sequence
  Description of Artificial Sequence: Synthetic oligonucleotide
  Target: SCNA; (+) strand; PAM type: YTN; PAM sequence: TTA
tcacatgaaaaatgggtact

SEQ ID NO: 78311 - DNA, 20 bp, Artificial Sequence
  Description of Artificial Sequence: Synthetic oligonucleotide
  Target: SCNA; (+) strand; PAM type: YTN; PAM sequence: CTT
tggggagattttctcctaaa

SEQ ID NO: 78312 - DNA, 20 bp, Artificial Sequence
  Description of Artificial Sequence: Synthetic oligonucleotide
  Target: SCNA; (+) strand; PAM type: YTN; PAM sequence: TTT
ggggagattttctcctaaag

SEQ ID NO: 78313 - DNA, 20 bp, Artificial Sequence
  Description of Artificial Sequence: Synthetic oligonucleotide
  Target: SCNA; (+) strand; PAM type: YTN; PAM sequence: TTG
gggagattttctcctaaagc

SEQ ID NO: 78314 - DNA, 20 bp, Artificial Sequence
  Description of Artificial Sequence: Synthetic oligonucleotide
  Target: SCNA; (+) strand; PAM type: YTN; PAM sequence: TTT
tctcctaaagccttcatttt

SEQ ID NO: 78315 - DNA, 20 bp, Artificial Sequence
  Description of Artificial Sequence: Synthetic oligonucleotide
  Target: SCNA; (+) strand; PAM type: YTN; PAM sequence: TTT
ctcctaaagccttcattttt

SEQ ID NO: 78316 - DNA, 20 bp, Artificial Sequence
  Description of Artificial Sequence: Synthetic oligonucleotide
  Target: SCNA; (+) strand; PAM type: YTN; PAM sequence: TTC
tcctaaagccttcatttttt

SEQ ID NO: 78317 - DNA, 20 bp, Artificial Sequence
  Description of Artificial Sequence: Synthetic oligonucleotide
  Target: SCNA; (+) strand; PAM type: YTN; PAM sequence: CTC
ctaaagccttcattttttca

SEQ ID NO: 78318 - DNA, 20 bp, Artificial Sequence
  Description of Artificial Sequence: Synthetic oligonucleotide
  Target: SCNA; (+) strand; PAM type: YTN; PAM sequence: CTA
aagccttcattttttcatat

SEQ ID NO: 78319 - DNA, 20 bp, Artificial Sequence
  Description of Artificial Sequence: Synthetic oligonucleotide
  Target: SCNA; (+) strand; PAM type: YTN; PAM sequence: CTT
cattttttcatatatagtga

SEQ ID NO: 78320 - DNA, 20 bp, Artificial Sequence
  Description of Artificial Sequence: Synthetic oligonucleotide
  Target: SCNA; (+) strand; PAM type: YTN; PAM sequence: TTC
attttttcatatatagtgag

SEQ ID NO: 78321 - DNA, 20 bp, Artificial Sequence
  Description of Artificial Sequence: Synthetic oligonucleotide
  Target: SCNA; (+) strand; PAM type: YTN; PAM sequence: TTT
tttcatatatagtgagatct

SEQ ID NO: 78322 - DNA, 20 bp, Artificial Sequence
  Description of Artificial Sequence: Synthetic oligonucleotide
  Target: SCNA; (+) strand; PAM type: YTN; PAM sequence: TTT
ttcatatatagtgagatcta

SEQ ID NO: 78323 - DNA, 20 bp, Artificial Sequence
  Description of Artificial Sequence: Synthetic oligonucleotide
  Target: SCNA; (+) strand; PAM type: YTN; PAM sequence: TTT
tcatatatagtgagatctaa

SEQ ID NO: 78324 - DNA, 20 bp, Artificial Sequence
  Description of Artificial Sequence: Synthetic oligonucleotide
  Target: SCNA; (+) strand; PAM type: YTN; PAM sequence: TTT
catatatagtgagatctaaa

SEQ ID NO: 78325 - DNA, 20 bp, Artificial Sequence
  Description of Artificial Sequence: Synthetic oligonucleotide
  Target: SCNA; (+) strand; PAM type: YTN; PAM sequence: TTC
atatatagtgagatctaaac

SEQ ID NO: 78326 - DNA, 20 bp, Artificial Sequence
  Description of Artificial Sequence: Synthetic oligonucleotide
  Target: SCNA; (+) strand; PAM type: YTN; PAM sequence: CTA
aacaaccaatttctatttac

SEQ ID NO: 78327 - DNA, 20 bp, Artificial Sequence
  Description of Artificial Sequence: Synthetic oligonucleotide
  Target: SCNA; (+) strand; PAM type: YTN; PAM sequence: TTT
ctatttacagttgaattcta

SEQ ID NO: 78328 - DNA, 20 bp, Artificial Sequence
  Description of Artificial Sequence: Synthetic oligonucleotide
  Target: SCNA; (+) strand; PAM type: YTN; PAM sequence: TTC
tatttacagttgaattctac

SEQ ID NO: 78329 - DNA, 20 bp, Artificial Sequence
  Description of Artificial Sequence: Synthetic oligonucleotide
  Target: SCNA; (+) strand; PAM type: YTN; PAM sequence: CTA
tttacagttgaattctactt

SEQ ID NO: 78330 - DNA, 20 bp, Artificial Sequence
  Description of Artificial Sequence: Synthetic oligonucleotide
  Target: SCNA; (+) strand; PAM type: YTN; PAM sequence: TTT
acagttgaattctacttcca

SEQ ID NO: 78331 - DNA, 20 bp, Artificial Sequence
  Description of Artificial Sequence: Synthetic oligonucleotide
  Target: SCNA; (+) strand; PAM type: YTN; PAM sequence: TTA
cagttgaattctacttccaa

SEQ ID NO: 78332 - DNA, 20 bp, Artificial Sequence
  Description of Artificial Sequence: Synthetic oligonucleotide
  Target: SCNA; (+) strand; PAM type: YTN; PAM sequence: TTG
aattctacttccaaaaacat

SEQ ID NO: 78333 - DNA, 20 bp, Artificial Sequence
  Description of Artificial Sequence: Synthetic oligonucleotide
  Target: SCNA; (+) strand; PAM type: YTN; PAM sequence: TTC
tacttccaaaaacatacaac

SEQ ID NO: 78334 - DNA, 20 bp, Artificial Sequence
  Description of Artificial Sequence: Synthetic oligonucleotide
  Target: SCNA; (+) strand; PAM type: YTN; PAM sequence: CTA
cttccaaaaacatacaacta

SEQ ID NO: 78335 - DNA, 20 bp, Artificial Sequence
  Description of Artificial Sequence: Synthetic oligonucleotide
  Target: SCNA; (+) strand; PAM type: YTN; PAM sequence: CTT
ccaaaaacatacaactatga

SEQ ID NO: 78336 - DNA, 20 bp, Artificial Sequence
  Description of Artificial Sequence: Synthetic oligonucleotide
  Target: SCNA; (+) strand; PAM type: YTN; PAM sequence: TTC
caaaaacatacaactatgac

SEQ ID NO: 78337 - DNA, 20 bp, Artificial Sequence
  Description of Artificial Sequence: Synthetic oligonucleotide
  Target: SCNA; (+) strand; PAM type: YTN; PAM sequence: CTA
tgactcaatccttgttacct

SEQ ID NO: 78338 - DNA, 20 bp, Artificial Sequence
  Description of Artificial Sequence: Synthetic oligonucleotide
  Target: SCNA; (+) strand; PAM type: YTN; PAM sequence: CTC
aatccttgttacctttcaat

SEQ ID NO: 78339 - DNA, 20 bp, Artificial Sequence
  Description of Artificial Sequence: Synthetic oligonucleotide
  Target: SCNA; (+) strand; PAM type: YTN; PAM sequence: CTT
gttacctttcaataaactgt

SEQ ID NO: 78340 - DNA, 20 bp, Artificial Sequence
  Description of Artificial Sequence: Synthetic oligonucleotide
  Target: SCNA; (+) strand; PAM type: YTN; PAM sequence: TTG
ttacctttcaataaactgtt

SEQ ID NO: 78341 - DNA, 20 bp, Artificial Sequence
  Description of Artificial Sequence: Synthetic oligonucleotide
  Target: SCNA; (+) strand; PAM type: YTN; PAM sequence: TTA
cctttcaataaactgttaag

SEQ ID NO: 78342 - DNA, 20 bp, Artificial Sequence
  Description of Artificial Sequence: Synthetic oligonucleotide
  Target: SCNA; (+) strand; PAM type: YTN; PAM sequence: CTT
tcaataaactgttaagccca

SEQ ID NO: 78343 - DNA, 20 bp, Artificial Sequence
  Description of Artificial Sequence: Synthetic oligonucleotide
  Target: SCNA; (+) strand; PAM type: YTN; PAM sequence: TTT
caataaactgttaagcccaa

SEQ ID NO: 78344 - DNA, 20 bp, Artificial Sequence
  Description of Artificial Sequence: Synthetic oligonucleotide
  Target: SCNA; (+) strand; PAM type: YTN; PAM sequence: TTC
aataaactgttaagcccaaa

SEQ ID NO: 78345 - DNA, 20 bp, Artificial Sequence
  Description of Artificial Sequence: Synthetic oligonucleotide
  Target: SCNA; (+) strand; PAM type: YTN; PAM sequence: CTG
ttaagcccaaagatataact

SEQ ID NO: 78346 - DNA, 20 bp, Artificial Sequence
  Description of Artificial Sequence: Synthetic oligonucleotide
  Target: SCNA; (+) strand; PAM type: YTN; PAM sequence: TTA
agcccaaagatataacttat

SEQ ID NO: 78347 - DNA, 20 bp, Artificial Sequence
  Description of Artificial Sequence: Synthetic oligonucleotide
  Target: SCNA; (+) strand; PAM type: YTN; PAM sequence: CTT
attttaaaatgtgaacctag

SEQ ID NO: 78348 - DNA, 20 bp, Artificial Sequence
  Description of Artificial Sequence: Synthetic oligonucleotide
  Target: SCNA; (+) strand; PAM type: YTN; PAM sequence: TTA
ttttaaaatgtgaacctaga

SEQ ID NO: 78349 - DNA, 20 bp, Artificial Sequence
  Description of Artificial Sequence: Synthetic oligonucleotide
  Target: SCNA; (+) strand; PAM type: YTN; PAM sequence: TTT
taaaatgtgaacctagacat

SEQ ID NO: 78350 - DNA, 20 bp, Artificial Sequence
  Description of Artificial Sequence: Synthetic oligonucleotide
  Target: SCNA; (+) strand; PAM type: YTN; PAM sequence: TTT
aaaatgtgaacctagacatt

SEQ ID NO: 78351 - DNA, 20 bp, Artificial Sequence
  Description of Artificial Sequence: Synthetic oligonucleotide
  Target: SCNA; (+) strand; PAM type: YTN; PAM sequence: TTA
aaatgtgaacctagacattt

SEQ ID NO: 78352 - DNA, 20 bp, Artificial Sequence
  Description of Artificial Sequence: Synthetic oligonucleotide
  Target: SCNA; (+) strand; PAM type: YTN; PAM sequence: CTA
gacatttgggatgatcaggc

SEQ ID NO: 78353 - DNA, 20 bp, Artificial Sequence
  Description of Artificial Sequence: Synthetic oligonucleotide
  Target: SCNA; (+) strand; PAM type: YTN; PAM sequence: TTT
gggatgatcaggcatgctag

SEQ ID NO: 78354 - DNA, 20 bp, Artificial Sequence
  Description of Artificial Sequence: Synthetic oligonucleotide
  Target: SCNA; (+) strand; PAM type: YTN; PAM sequence: TTG
ggatgatcaggcatgctagt

SEQ ID NO: 78355 - DNA, 20 bp, Artificial Sequence
  Description of Artificial Sequence: Synthetic oligonucleotide
  Target: SCNA; (+) strand; PAM type: YTN; PAM sequence: CTA
gttactattaagaatagcag

SEQ ID NO: 78356 - DNA, 20 bp, Artificial Sequence
  Description of Artificial Sequence: Synthetic oligonucleotide
  Target: SCNA; (+) strand; PAM type: YTN; PAM sequence: TTA
ctattaagaatagcagtatg

SEQ ID NO: 78357 - DNA, 20 bp, Artificial Sequence
  Description of Artificial Sequence: Synthetic oligonucleotide
  Target: SCNA; (+) strand; PAM type: YTN; PAM sequence: CTA
ttaagaatagcagtatgtac

SEQ ID NO: 78358 - DNA, 20 bp, Artificial Sequence
  Description of Artificial Sequence: Synthetic oligonucleotide
  Target: SCNA; (+) strand; PAM type: YTN; PAM sequence: TTA
agaatagcagtatgtactaa

SEQ ID NO: 78359 - DNA, 20 bp, Artificial Sequence
  Description of Artificial Sequence: Synthetic oligonucleotide
  Target: SCNA; (+) strand; PAM type: YTN; PAM sequence: CTA
ataaaatggtattcagagat

SEQ ID NO: 78360 - DNA, 20 bp, Artificial Sequence
  Description of Artificial Sequence: Synthetic oligonucleotide
  Target: SCNA; (+) strand; PAM type: YTN; PAM sequence: TTC
agagattataagggaagcac

SEQ ID NO: 78361 - DNA, 20 bp, Artificial Sequence
  Description of Artificial Sequence: Synthetic oligonucleotide
  Target: SCNA; (+) strand; PAM type: YTN; PAM sequence: TTA
taagggaagcactaatgaat

SEQ ID NO: 78362 - DNA, 20 bp, Artificial Sequence
  Description of Artificial Sequence: Synthetic oligonucleotide
  Target: SCNA; (+) strand; PAM type: YTN; PAM sequence: CTA
atgaataaaaatgacccaaa

SEQ ID NO: 78363 - DNA, 20 bp, Artificial Sequence
  Description of Artificial Sequence: Synthetic oligonucleotide
  Target: SCNA; (+) strand; PAM type: YTN; PAM sequence: CTA
tatataaagtctttgttcat

SEQ ID NO: 78364 - DNA, 20 bp, Artificial Sequence
  Description of Artificial Sequence: Synthetic oligonucleotide
  Target: SCNA; (+) strand; PAM type: YTN; PAM sequence: CTT
tgttcatacacaaaataaac

SEQ ID NO: 78365 - DNA, 20 bp, Artificial Sequence
  Description of Artificial Sequence: Synthetic oligonucleotide
  Target: SCNA; (+) strand; PAM type: YTN; PAM sequence: TTT
gttcatacacaaaataaaca

SEQ ID NO: 78366 - DNA, 20 bp, Artificial Sequence
  Description of Artificial Sequence: Synthetic oligonucleotide
  Target: SCNA; (+) strand; PAM type: YTN; PAM sequence: TTG
ttcatacacaaaataaacac

SEQ ID NO: 78367 - DNA, 20 bp, Artificial Sequence
  Description of Artificial Sequence: Synthetic oligonucleotide
  Target: SCNA; (+) strand; PAM type: YTN; PAM sequence: TTC
atacacaaaataaacacatg

SEQ ID NO: 78368 - DNA, 20 bp, Artificial Sequence
  Description of Artificial Sequence: Synthetic oligonucleotide
  Target: SCNA; (+) strand; PAM type: YTN; PAM sequence: CTA
tggatggggttctctaacga

SEQ ID NO: 78369 - DNA, 20 bp, Artificial Sequence
  Description of Artificial Sequence: Synthetic oligonucleotide
  Target: SCNA; (+) strand; PAM type: YTN; PAM sequence: TTC
tctaacgacagtagaagtaa

SEQ ID NO: 78370 - DNA, 20 bp, Artificial Sequence
  Description of Artificial Sequence: Synthetic oligonucleotide
  Target: SCNA; (+) strand; PAM type: YTN; PAM sequence: CTC
taacgacagtagaagtaaac

SEQ ID NO: 78371 - DNA, 20 bp, Artificial Sequence
  Description of Artificial Sequence: Synthetic oligonucleotide
  Target: SCNA; (+) strand; PAM type: YTN; PAM sequence: CTA
acgacagtagaagtaaacgg

SEQ ID NO: 78372 - DNA, 20 bp, Artificial Sequence
  Description of Artificial Sequence: Synthetic oligonucleotide
  Target: SCNA; (+) strand; PAM type: YTN; PAM sequence: CTA
aagagtgtatcaaaaactgc

SEQ ID NO: 78373 - DNA, 20 bp, Artificial Sequence
  Description of Artificial Sequence: Synthetic oligonucleotide
  Target: SCNA; (+) strand; PAM type: YTN; PAM sequence: CTG
cacttttacagtttcctata

SEQ ID NO: 78374 - DNA, 20 bp, Artificial Sequence
  Description of Artificial Sequence: Synthetic oligonucleotide
  Target: SCNA; (+) strand; PAM type: YTN; PAM sequence: CTT
ttacagtttcctatatatcg

SEQ ID NO: 78375 - DNA, 20 bp, Artificial Sequence
  Description of Artificial Sequence: Synthetic oligonucleotide
  Target: SCNA; (+) strand; PAM type: YTN; PAM sequence: TTT
tacagtttcctatatatcgt

SEQ ID NO: 78376 - DNA, 20 bp, Artificial Sequence
  Description of Artificial Sequence: Synthetic oligonucleotide
  Target: SCNA; (+) strand; PAM type: YTN; PAM sequence: TTT
acagtttcctatatatcgtc

SEQ ID NO: 78377 - DNA, 20 bp, Artificial Sequence
  Description of Artificial Sequence: Synthetic oligonucleotide
  Target: SCNA; (+) strand; PAM type: YTN; PAM sequence: TTA
cagtttcctatatatcgtca

SEQ ID NO: 78378 - DNA, 20 bp, Artificial Sequence
  Description of Artificial Sequence: Synthetic oligonucleotide
  Target: SCNA; (+) strand; PAM type: YTN; PAM sequence: TTT
cctatatatcgtcagacagg

SEQ ID NO: 78379 - DNA, 20 bp, Artificial Sequence
  Description of Artificial Sequence: Synthetic oligonucleotide
  Target: SCNA; (+) strand; PAM type: YTN; PAM sequence: TTC
ctatatatcgtcagacaggt

SEQ ID NO: 78380 - DNA, 20 bp, Artificial Sequence
  Description of Artificial Sequence: Synthetic oligonucleotide
  Target: SCNA; (+) strand; PAM type: YTN; PAM sequence: CTA
tatatcgtcagacaggttaa

SEQ ID NO: 78381 - DNA, 20 bp, Artificial Sequence
  Description of Artificial Sequence: Synthetic oligonucleotide
  Target: SCNA; (+) strand; PAM type: YTN; PAM sequence: TTA
acaaaagtatcgaaaagttg

SEQ ID NO: 78382 - DNA, 20 bp, Artificial Sequence
  Description of Artificial Sequence: Synthetic oligonucleotide
  Target: SCNA; (+) strand; PAM type: YTN; PAM sequence: TTG
gcatactgtggataaagtac

SEQ ID NO: 78383 - DNA, 20 bp, Artificial Sequence
  Description of Artificial Sequence: Synthetic oligonucleotide
  Target: SCNA; (+) strand; PAM type: YTN; PAM sequence: CTG
tggataaagtacattaaaat

SEQ ID NO: 78384 - DNA, 20 bp, Artificial Sequence
  Description of Artificial Sequence: Synthetic oligonucleotide
  Target: SCNA; (+) strand; PAM type: YTN; PAM sequence: TTA
aaatgagaaaggcaaagttt

SEQ ID NO: 78385 - DNA, 20 bp, Artificial Sequence
  Description of Artificial Sequence: Synthetic oligonucleotide
  Target: SCNA; (+) strand; PAM type: YTN; PAM sequence: TTT
taaggatatatgaaaatgaa

SEQ ID NO: 78386 - DNA, 20 bp, Artificial Sequence
  Description of Artificial Sequence: Synthetic oligonucleotide
  Target: SCNA; (+) strand; PAM type: YTN; PAM sequence: TTT
aaggatatatgaaaatgaaa

SEQ ID NO: 78387 - DNA, 20 bp, Artificial Sequence
  Description of Artificial Sequence: Synthetic oligonucleotide
  Target: SCNA; (+) strand; PAM type: YTN; PAM sequence: TTA
aggatatatgaaaatgaaag

SEQ ID NO: 78388 - DNA, 20 bp, Artificial Sequence
  Description of Artificial Sequence: Synthetic oligonucleotide
  Target: SCNA; (+) strand; PAM type: YTN; PAM sequence: CTA
gtatggtcgaaattcatgtg

SEQ ID NO: 78389 - DNA, 20 bp, Artificial Sequence
  Description of Artificial Sequence: Synthetic oligonucleotide
  Target: SCNA; (+) strand; PAM type: YTN; PAM sequence: TTC
atgtgataaatcgtaataac

SEQ ID NO: 78390 - DNA, 20 bp, Artificial Sequence
  Description of Artificial Sequence: Synthetic oligonucleotide
  Target: SCNA; (+) strand; PAM type: YTN; PAM sequence: TTA
agtggtggggccttgcagag

SEQ ID NO: 78391 - DNA, 20 bp, Artificial Sequence
  Description of Artificial Sequence: Synthetic oligonucleotide
  Target: SCNA; (+) strand; PAM type: YTN; PAM sequence: CTT
gcagaggtaataaagtcacg

SEQ ID NO: 78392 - DNA, 20 bp, Artificial Sequence
  Description of Artificial Sequence: Synthetic oligonucleotide
  Target: SCNA; (+) strand; PAM type: YTN; PAM sequence: TTG
cagaggtaataaagtcacgg

SEQ ID NO: 78393 - DNA, 20 bp, Artificial Sequence
  Description of Artificial Sequence: Synthetic oligonucleotide
  Target: SCNA; (+) strand; PAM type: YTN; PAM sequence: CTG
acaagtggaattggtaacat

SEQ ID NO: 78394 - DNA, 20 bp, Artificial Sequence
  Description of Artificial Sequence: Synthetic oligonucleotide
  Target: SCNA; (+) strand; PAM type: YTN; PAM sequence: TTG
gtaacattatgaaaggcctt

SEQ ID NO: 78395 - DNA, 20 bp, Artificial Sequence
  Description of Artificial Sequence: Synthetic oligonucleotide
  Target: SCNA; (+) strand; PAM type: YTN; PAM sequence: TTA
tgaaaggccttgagggagtg

SEQ ID NO: 78396 - DNA, 20 bp, Artificial Sequence
  Description of Artificial Sequence: Synthetic oligonucleotide
  Target: SCNA; (+) strand; PAM type: YTN; PAM sequence: CTT
gagggagtgagttggccctt

SEQ ID NO: 78397 - DNA, 20 bp, Artificial Sequence
  Description of Artificial Sequence: Synthetic oligonucleotide
  Target: SCNA; (+) strand; PAM type: YTN; PAM sequence: TTG
agggagtgagttggcccttt

SEQ ID NO: 78398 - DNA, 20 bp, Artificial Sequence
  Description of Artificial Sequence: Synthetic oligonucleotide
  Target: SCNA; (+) strand; PAM type: YTN; PAM sequence: TTG
gccctttctatctctctacc

SEQ ID NO: 78399 - DNA, 20 bp, Artificial Sequence
  Description of Artificial Sequence: Synthetic oligonucleotide
  Target: SCNA; (+) strand; PAM type: YTN; PAM sequence: CTT
tctatctctctaccatgtga

SEQ ID NO: 78400 - DNA, 20 bp, Artificial Sequence
  Description of Artificial Sequence: Synthetic oligonucleotide
  Target: SCNA; (+) strand; PAM type: YTN; PAM sequence: TTT
ctatctctctaccatgtgag

SEQ ID NO: 78401 - DNA, 20 bp, Artificial Sequence
  Description of Artificial Sequence: Synthetic oligonucleotide
  Target: SCNA; (+) strand; PAM type: YTN; PAM sequence: TTC
tatctctctaccatgtgaga

SEQ ID NO: 78402 - DNA, 20 bp, Artificial Sequence
  Description of Artificial Sequence: Synthetic oligonucleotide
  Target: SCNA; (+) strand; PAM type: YTN; PAM sequence: CTA
tctctctaccatgtgagaac

SEQ ID NO: 78403 - DNA, 20 bp, Artificial Sequence
  Description of Artificial Sequence: Synthetic oligonucleotide
  Target: SCNA; (+) strand; PAM type: YTN; PAM sequence: CTC
tctaccatgtgagaacacag

SEQ ID NO: 78404 - DNA, 20 bp, Artificial Sequence
  Description of Artificial Sequence: Synthetic oligonucleotide
  Target: SCNA; (+) strand; PAM type: YTN; PAM sequence: CTC
taccatgtgagaacacagca

SEQ ID NO: 78405 - DNA, 20 bp, Artificial Sequence
  Description of Artificial Sequence: Synthetic oligonucleotide
  Target: SCNA; (+) strand; PAM type: YTN; PAM sequence: CTA
ccatgtgagaacacagcatt

SEQ ID NO: 78406 - DNA, 20 bp, Artificial Sequence
  Description of Artificial Sequence: Synthetic oligonucleotide
  Target: SCNA; (+) strand; PAM type: YTN; PAM sequence: TTT
ggccctctggaggatacagt

SEQ ID NO: 78407 - DNA, 20 bp, Artificial Sequence
  Description of Artificial Sequence: Synthetic oligonucleotide
  Target: SCNA; (+) strand; PAM type: YTN; PAM sequence: TTG
gccctctggaggatacagtg

SEQ ID NO: 78408 - DNA, 20 bp, Artificial Sequence
  Description of Artificial Sequence: Synthetic oligonucleotide
  Target: SCNA; (+) strand; PAM type: YTN; PAM sequence: CTC
tggaggatacagtgacaaga

SEQ ID NO: 78409 - DNA, 20 bp, Artificial Sequence
  Description of Artificial Sequence: Synthetic oligonucleotide
  Target: SCNA; (+) strand; PAM type: YTN; PAM sequence: CTG
gaggatacagtgacaagaca

SEQ ID NO: 78410 - DNA, 20 bp, Artificial Sequence
  Description of Artificial Sequence: Synthetic oligonucleotide
  Target: SCNA; (+) strand; PAM type: YTN; PAM sequence: CTT
gggagtagagaaccggccct

SEQ ID NO: 78411 - DNA, 20 bp, Artificial Sequence
  Description of Artificial Sequence: Synthetic oligonucleotide
  Target: SCNA; (+) strand; PAM type: YTN; PAM sequence: TTG
ggagtagagaaccggccctc

SEQ ID NO: 78412 - DNA, 20 bp, Artificial Sequence
  Description of Artificial Sequence: Synthetic oligonucleotide
  Target: SCNA; (+) strand; PAM type: YTN; PAM sequence: CTC
gccagatactgaacctgaag

SEQ ID NO: 78413 - DNA, 20 bp, Artificial Sequence
  Description of Artificial Sequence: Synthetic oligonucleotide
  Target: SCNA; (+) strand; PAM type: YTN; PAM sequence: CTG
aacctgaagacaaatgcctt

SEQ ID NO: 78414 - DNA, 20 bp, Artificial Sequence
  Description of Artificial Sequence: Synthetic oligonucleotide
  Target: SCNA; (+) strand; PAM type: YTN; PAM sequence: CTG
aagacaaatgccttgatctt

SEQ ID NO: 78415 - DNA, 20 bp, Artificial Sequence
  Description of Artificial Sequence: Synthetic oligonucleotide
  Target: SCNA; (+) strand; PAM type: YTN; PAM sequence: CTT
gatcttggagttcccagcct

SEQ ID NO: 78416 - DNA, 20 bp, Artificial Sequence
  Description of Artificial Sequence: Synthetic oligonucleotide
  Target: SCNA; (+) strand; PAM type: YTN; PAM sequence: TTG
atcttggagttcccagcctc

SEQ ID NO: 78417 - DNA, 20 bp, Artificial Sequence
  Description of Artificial Sequence: Synthetic oligonucleotide
  Target: SCNA; (+) strand; PAM type: YTN; PAM sequence: CTT
ggagttcccagcctccagag

SEQ ID NO: 78418 - DNA, 20 bp, Artificial Sequence
  Description of Artificial Sequence: Synthetic oligonucleotide
  Target: SCNA; (+) strand; PAM type: YTN; PAM sequence: TTG
gagttcccagcctccagagc

SEQ ID NO: 78419 - DNA, 20 bp, Artificial Sequence
  Description of Artificial Sequence: Synthetic oligonucleotide
  Target: SCNA; (+) strand; PAM type: YTN; PAM sequence: TTC
ccagcctccagagctatgag

SEQ ID NO: 78420 - DNA, 20 bp, Artificial Sequence
  Description of Artificial Sequence: Synthetic oligonucleotide
  Target: SCNA; (+) strand; PAM type: YTN; PAM sequence: CTC
cagagctatgagaaataaat

SEQ ID NO: 78421 - DNA, 20 bp, Artificial Sequence
  Description of Artificial Sequence: Synthetic oligonucleotide
  Target: SCNA; (+) strand; PAM type: YTN; PAM sequence: CTA
tgagaaataaatttctgttg

SEQ ID NO: 78422 - DNA, 20 bp, Artificial Sequence
  Description of Artificial Sequence: Synthetic oligonucleotide
  Target: SCNA; (+) strand; PAM type: YTN; PAM sequence: TTT
ctgttgtttgtaaattaccc

SEQ ID NO: 78423 - DNA, 20 bp, Artificial Sequence
  Description of Artificial Sequence: Synthetic oligonucleotide
  Target: SCNA; (+) strand; PAM type: YTN; PAM sequence: TTC
tgttgtttgtaaattaccca

SEQ ID NO: 78424 - DNA, 20 bp, Artificial Sequence
  Description of Artificial Sequence: Synthetic oligonucleotide
  Target: SCNA; (+) strand; PAM type: YTN; PAM sequence: CTG
ttgtttgtaaattacccagt

SEQ ID NO: 78425 - DNA, 20 bp, Artificial Sequence
  Description of Artificial Sequence: Synthetic oligonucleotide
  Target: SCNA; (+) strand; PAM type: YTN; PAM sequence: TTG
tttgtaaattacccagtctc

SEQ ID NO: 78426 - DNA, 20 bp, Artificial Sequence
  Description of Artificial Sequence: Synthetic oligonucleotide
  Target: SCNA; (+) strand; PAM type: YTN; PAM sequence: TTT
gtaaattacccagtctcatg

SEQ ID NO: 78427 - DNA, 20 bp, Artificial Sequence
  Description of Artificial Sequence: Synthetic oligonucleotide
  Target: SCNA; (+) strand; PAM type: YTN; PAM sequence: TTG
taaattacccagtctcatgt

SEQ ID NO: 78428 - DNA, 20 bp, Artificial Sequence
  Description of Artificial Sequence: Synthetic oligonucleotide
  Target: SCNA; (+) strand; PAM type: YTN; PAM sequence: TTA
cccagtctcatgtattttgt

SEQ ID NO: 78429 - DNA, 20 bp, Artificial Sequence
  Description of Artificial Sequence: Synthetic oligonucleotide
  Target: SCNA; (+) strand; PAM type: YTN; PAM sequence: CTC
atgtattttgttataacagc

SEQ ID NO: 78430 - DNA, 20 bp, Artificial Sequence
  Description of Artificial Sequence: Synthetic oligonucleotide
  Target: SCNA; (+) strand; PAM type: YTN; PAM sequence: TTT
tgttataacagcacaaacag

SEQ ID NO: 78431 - DNA, 20 bp, Artificial Sequence
  Description of Artificial Sequence: Synthetic oligonucleotide
  Target: SCNA; (+) strand; PAM type: YTN; PAM sequence: TTT
gttataacagcacaaacaga

SEQ ID NO: 78432 - DNA, 20 bp, Artificial Sequence
  Description of Artificial Sequence: Synthetic oligonucleotide
  Target: SCNA; (+) strand; PAM type: YTN; PAM sequence: TTG
ttataacagcacaaacagat

SEQ ID NO: 78433 - DNA, 20 bp, Artificial Sequence
  Description of Artificial Sequence: Synthetic oligonucleotide
  Target: SCNA; (+) strand; PAM type: YTN; PAM sequence: TTA
taacagcacaaacagattaa

SEQ ID NO: 78434 - DNA, 20 bp, Artificial Sequence
  Description of Artificial Sequence: Synthetic oligonucleotide
  Target: SCNA; (+) strand; PAM type: YTN; PAM sequence: TTA
agacaacagctttctcagag

SEQ ID NO: 78435 - DNA, 20 bp, Artificial Sequence
  Description of Artificial Sequence: Synthetic oligonucleotide
  Target: SCNA; (+) strand; PAM type: YTN; PAM sequence: CTT
tctcagagcccaaaacattt

SEQ ID NO: 78436 - DNA, 20 bp, Artificial Sequence
  Description of Artificial Sequence: Synthetic oligonucleotide
  Target: SCNA; (+) strand; PAM type: YTN; PAM sequence: TTT
ctcagagcccaaaacattta

SEQ ID NO: 78437 - DNA, 20 bp, Artificial Sequence
  Description of Artificial Sequence: Synthetic oligonucleotide
  Target: SCNA; (+) strand; PAM type: YTN; PAM sequence: TTC
tcagagcccaaaacatttat

SEQ ID NO: 78438 - DNA, 20 bp, Artificial Sequence
  Description of Artificial Sequence: Synthetic oligonucleotide
  Target: SCNA; (+) strand; PAM type: YTN; PAM sequence: CTC
agagcccaaaacatttataa

SEQ ID NO: 78439 - DNA, 20 bp, Artificial Sequence
  Description of Artificial Sequence: Synthetic oligonucleotide
  Target: SCNA; (+) strand; PAM type: YTN; PAM sequence: TTT
ataatagtaagaatttgcaa

SEQ ID NO: 78440 - DNA, 20 bp, Artificial Sequence
  Description of Artificial Sequence: Synthetic oligonucleotide
  Target: SCNA; (+) strand; PAM type: YTN; PAM sequence: TTA
taatagtaagaatttgcaaa

SEQ ID NO: 78441 - DNA, 20 bp, Artificial Sequence
  Description of Artificial Sequence: Synthetic oligonucleotide
  Target: SCNA; (+) strand; PAM type: YTN; PAM sequence: TTT
gcaaaatcaaacaatgagta

SEQ ID NO: 78442 - DNA, 20 bp, Artificial Sequence
  Description of Artificial Sequence: Synthetic oligonucleotide
  Target: SCNA; (+) strand; PAM type: YTN; PAM sequence: TTG
caaaatcaaacaatgagtaa

SEQ ID NO: 78443 - DNA, 20 bp, Artificial Sequence
  Description of Artificial Sequence: Synthetic oligonucleotide
  Target: SCNA; (+) strand; PAM type: YTN; PAM sequence: CTC
aaatgatcagctgtacttgc

SEQ ID NO: 78444 - DNA, 20 bp, Artificial Sequence
  Description of Artificial Sequence: Synthetic oligonucleotide
  Target: SCNA; (+) strand; PAM type: YTN; PAM sequence: CTG
tacttgctaaaaatgaaaga

SEQ ID NO: 78445 - DNA, 20 bp, Artificial Sequence
  Description of Artificial Sequence: Synthetic oligonucleotide
  Target: SCNA; (+) strand; PAM type: YTN; PAM sequence: CTT
gctaaaaatgaaagaacaac

SEQ ID NO: 78446 - DNA, 20 bp, Artificial Sequence
  Description of Artificial Sequence: Synthetic oligonucleotide
  Target: SCNA; (+) strand; PAM type: YTN; PAM sequence: TTG
ctaaaaatgaaagaacaact

SEQ ID NO: 78447 - DNA, 20 bp, Artificial Sequence
  Description of Artificial Sequence: Synthetic oligonucleotide
  Target: SCNA; (+) strand; PAM type: YTN; PAM sequence: CTA
aaaatgaaagaacaactaaa

SEQ ID NO: 78448 - DNA, 20 bp, Artificial Sequence
  Description of Artificial Sequence: Synthetic oligonucleotide
  Target: SCNA; (+) strand; PAM type: YTN; PAM sequence: CTA
aatcactcaattcacttggg

SEQ ID NO: 78449 - DNA, 20 bp, Artificial Sequence
  Description of Artificial Sequence: Synthetic oligonucleotide
  Target: SCNA; (+) strand; PAM type: YTN; PAM sequence: CTC
aattcacttgggcaagacaa

SEQ ID NO: 78450 - DNA, 20 bp, Artificial Sequence
  Description of Artificial Sequence: Synthetic oligonucleotide
  Target: SCNA; (+) strand; PAM type: YTN; PAM sequence: TTC
acttgggcaagacaatccat

SEQ ID NO: 78451 - DNA, 20 bp, Artificial Sequence
  Description of Artificial Sequence: Synthetic oligonucleotide
  Target: SCNA; (+) strand; PAM type: YTN; PAM sequence: CTT
gggcaagacaatccattatt

SEQ ID NO: 78452 - DNA, 20 bp, Artificial Sequence
  Description of Artificial Sequence: Synthetic oligonucleotide
  Target: SCNA; (+) strand; PAM type: YTN; PAM sequence: TTG
ggcaagacaatccattattc

SEQ ID NO: 78453 - DNA, 20 bp, Artificial Sequence
  Description of Artificial Sequence: Synthetic oligonucleotide
  Target: SCNA; (+) strand; PAM type: YTN; PAM sequence: TTA
ttcgtctaaaatttttgtta

SEQ ID NO: 78454 - DNA, 20 bp, Artificial Sequence
  Description of Artificial Sequence: Synthetic oligonucleotide
  Target: SCNA; (+) strand; PAM type: YTN; PAM sequence: TTC
gtctaaaatttttgttaata

SEQ ID NO: 78455 - DNA, 20 bp, Artificial Sequence
  Description of Artificial Sequence: Synthetic oligonucleotide
  Target: SCNA; (+) strand; PAM type: YTN; PAM sequence: CTA
aaatttttgttaataatttt

SEQ ID NO: 78456 - DNA, 20 bp, Artificial Sequence
  Description of Artificial Sequence: Synthetic oligonucleotide
  Target: SCNA; (+) strand; PAM type: YTN; PAM sequence: TTT
ttgttaataattttctgatt

SEQ ID NO: 78457 - DNA, 20 bp, Artificial Sequence
  Description of Artificial Sequence: Synthetic oligonucleotide
  Target: SCNA; (+) strand; PAM type: YTN; PAM sequence: TTT
tgttaataattttctgattt

SEQ ID NO: 78458 - DNA, 20 bp, Artificial Sequence
  Description of Artificial Sequence: Synthetic oligonucleotide
  Target: SCNA; (+) strand; PAM type: YTN; PAM sequence: TTT
gttaataattttctgattta

SEQ ID NO: 78459 - DNA, 20 bp, Artificial Sequence
  Description of Artificial Sequence: Synthetic oligonucleotide
  Target: SCNA; (+) strand; PAM type: YTN; PAM sequence: TTG
ttaataattttctgatttac

SEQ ID NO: 78460 - DNA, 20 bp, Artificial Sequence
  Description of Artificial Sequence: Synthetic oligonucleotide
  Target: SCNA; (+) strand; PAM type: YTN; PAM sequence: TTA
ataattttctgatttactat

SEQ ID NO: 78461 - DNA, 20 bp, Artificial Sequence
  Description of Artificial Sequence: Synthetic oligonucleotide
  Target: SCNA; (+) strand; PAM type: YTN; PAM sequence: TTT
tctgatttactatctaatag

SEQ ID NO: 78462 - DNA, 20 bp, Artificial Sequence
  Description of Artificial Sequence: Synthetic oligonucleotide
  Target: SCNA; (+) strand; PAM type: YTN; PAM sequence: TTT
ctgatttactatctaatagt

SEQ ID NO: 78463 - DNA, 20 bp, Artificial Sequence
  Description of Artificial Sequence: Synthetic oligonucleotide
  Target: SCNA; (+) strand; PAM type: YTN; PAM sequence: TTC
tgatttactatctaatagta

SEQ ID NO: 78464 - DNA, 20 bp, Artificial Sequence
  Description of Artificial Sequence: Synthetic oligonucleotide
  Target: SCNA; (+) strand; PAM type: YTN; PAM sequence: CTG
atttactatctaatagtact

SEQ ID NO: 78465 - DNA, 20 bp, Artificial Sequence
  Description of Artificial Sequence: Synthetic oligonucleotide
  Target: SCNA; (+) strand; PAM type: YTN; PAM sequence: TTT
actatctaatagtactggat

SEQ ID NO: 78466 - DNA, 20 bp, Artificial Sequence
  Description of Artificial Sequence: Synthetic oligonucleotide
  Target: SCNA; (+) strand; PAM type: YTN; PAM sequence: TTA
ctatctaatagtactggata

SEQ ID NO: 78467 - DNA, 20 bp, Artificial Sequence
  Description of Artificial Sequence: Synthetic oligonucleotide
  Target: SCNA; (+) strand; PAM type: YTN; PAM sequence: CTA
tctaatagtactggatacca

SEQ ID NO: 78468 - DNA, 20 bp, Artificial Sequence
  Description of Artificial Sequence: Synthetic oligonucleotide
  Target: SCNA; (+) strand; PAM type: YTN; PAM sequence: CTA
atagtactggataccataca

SEQ ID NO: 78469 - DNA, 20 bp, Artificial Sequence
  Description of Artificial Sequence: Synthetic oligonucleotide
  Target: SCNA; (+) strand; PAM type: YTN; PAM sequence: CTG
gataccatacaaccaattac

SEQ ID NO: 78470 - DNA, 20 bp, Artificial Sequence
  Description of Artificial Sequence: Synthetic oligonucleotide
  Target: SCNA; (+) strand; PAM type: YTN; PAM sequence: TTA
ctcctacaaatttttttgtt

SEQ ID NO: 78471 - DNA, 20 bp, Artificial Sequence
  Description of Artificial Sequence: Synthetic oligonucleotide
  Target: SCNA; (+) strand; PAM type: YTN; PAM sequence: CTC
ctacaaatttttttgttaat

SEQ ID NO: 78472 - DNA, 20 bp, Artificial Sequence
  Description of Artificial Sequence: Synthetic oligonucleotide
  Target: SCNA; (+) strand; PAM type: YTN; PAM sequence: CTA
caaatttttttgttaatagt

SEQ ID NO: 78473 - DNA, 20 bp, Artificial Sequence
  Description of Artificial Sequence: Synthetic oligonucleotide
  Target: SCNA; (+) strand; PAM type: YTN; PAM sequence: TTT
ttttgttaatagttctctgt

SEQ ID NO: 78474 - DNA, 20 bp, Artificial Sequence
  Description of Artificial Sequence: Synthetic oligonucleotide
  Target: SCNA; (+) strand; PAM type: YTN; PAM sequence: TTT
tttgttaatagttctctgtt

SEQ ID NO: 78475 - DNA, 20 bp, Artificial Sequence
  Description of Artificial Sequence: Synthetic oligonucleotide
  Target: SCNA; (+) strand; PAM type: YTN; PAM sequence: TTT
ttgttaatagttctctgttt

SEQ ID NO: 78476 - DNA, 20 bp, Artificial Sequence
  Description of Artificial Sequence: Synthetic oligonucleotide
  Target: SCNA; (+) strand; PAM type: YTN; PAM sequence: TTT
tgttaatagttctctgtttt

SEQ ID NO: 78477 - DNA, 20 bp, Artificial Sequence
  Description of Artificial Sequence: Synthetic oligonucleotide
  Target: SCNA; (+) strand; PAM type: YTN; PAM sequence: TTT
gttaatagttctctgttttg

SEQ ID NO: 78478 - DNA, 20 bp, Artificial Sequence
  Description of Artificial Sequence: Synthetic oligonucleotide
  Target: SCNA; (+) strand; PAM type: YTN; PAM sequence: TTG
ttaatagttctctgttttgc

SEQ ID NO: 78479 - DNA, 20 bp, Artificial Sequence
  Description of Artificial Sequence: Synthetic oligonucleotide
  Target: SCNA; (+) strand; PAM type: YTN; PAM sequence: TTA
atagttctctgttttgcttt

SEQ ID NO: 78480 - DNA, 20 bp, Artificial Sequence
  Description of Artificial Sequence: Synthetic oligonucleotide
  Target: SCNA; (+) strand; PAM type: YTN; PAM sequence: TTC
tctgttttgctttttaataa

SEQ ID NO: 78481 - DNA, 20 bp, Artificial Sequence
  Description of Artificial Sequence: Synthetic oligonucleotide
  Target: SCNA; (+) strand; PAM type: YTN; PAM sequence: CTC
tgttttgctttttaataata

SEQ ID NO: 78482 - DNA, 20 bp, Artificial Sequence
  Description of Artificial Sequence: Synthetic oligonucleotide
  Target: SCNA; (+) strand; PAM type: YTN; PAM sequence: CTG
ttttgctttttaataatact

SEQ ID NO: 78483 - DNA, 20 bp, Artificial Sequence
  Description of Artificial Sequence: Synthetic oligonucleotide
  Target: SCNA; (+) strand; PAM type: YTN; PAM sequence: TTT
tgctttttaataatactgga

SEQ ID NO: 78484 - DNA, 20 bp, Artificial Sequence
  Description of Artificial Sequence: Synthetic oligonucleotide
  Target: SCNA; (+) strand; PAM type: YTN; PAM sequence: TTT
gctttttaataatactggat

SEQ ID NO: 78485 - DNA, 20 bp, Artificial Sequence
  Description of Artificial Sequence: Synthetic oligonucleotide
  Target: SCNA; (+) strand; PAM type: YTN; PAM sequence: TTG
ctttttaataatactggata

SEQ ID NO: 78486 - DNA, 20 bp, Artificial Sequence
  Description of Artificial Sequence: Synthetic oligonucleotide
  Target: SCNA; (+) strand; PAM type: YTN; PAM sequence: CTT
tttaataatactggatacca

SEQ ID NO: 78487 - DNA, 20 bp, Artificial Sequence
  Description of Artificial Sequence: Synthetic oligonucleotide
  Target: SCNA; (+) strand; PAM type: YTN; PAM sequence: TTT
ttaataatactggataccaa

SEQ ID NO: 78488 - DNA, 20 bp, Artificial Sequence
  Description of Artificial Sequence: Synthetic oligonucleotide
  Target: SCNA; (+) strand; PAM type: YTN; PAM sequence: TTT
taataatactggataccaat

SEQ ID NO: 78489 - DNA, 20 bp, Artificial Sequence
  Description of Artificial Sequence: Synthetic oligonucleotide
  Target: SCNA; (+) strand; PAM type: YTN; PAM sequence: TTT
aataatactggataccaata

SEQ ID NO: 78490 - DNA, 20 bp, Artificial Sequence
  Description of Artificial Sequence: Synthetic oligonucleotide
  Target: SCNA; (+) strand; PAM type: YTN; PAM sequence: TTA
ataatactggataccaatac

SEQ ID NO: 78491 - DNA, 20 bp, Artificial Sequence
  Description of Artificial Sequence: Synthetic oligonucleotide
  Target: SCNA; (+) strand; PAM type: YTN; PAM sequence: CTG
gataccaatactggatatcc

SEQ ID NO: 78492 - DNA, 20 bp, Artificial Sequence
  Description of Artificial Sequence: Synthetic oligonucleotide
  Target: SCNA; (+) strand; PAM type: YTN; PAM sequence: CTG
gatatccaaaatggtttgat

SEQ ID NO: 78493 - DNA, 20 bp, Artificial Sequence
  Description of Artificial Sequence: Synthetic oligonucleotide
  Target: SCNA; (+) strand; PAM type: YTN; PAM sequence: TTT
gatagttgggaacaaagggg

SEQ ID NO: 78494 - DNA, 20 bp, Artificial Sequence
  Description of Artificial Sequence: Synthetic oligonucleotide
  Target: SCNA; (+) strand; PAM type: YTN; PAM sequence: TTG
atagttgggaacaaagggga

SEQ ID NO: 78495 - DNA, 20 bp, Artificial Sequence
  Description of Artificial Sequence: Synthetic oligonucleotide
  Target: SCNA; (+) strand; PAM type: YTN; PAM sequence: TTG
ggaacaaaggggataaagga

SEQ ID NO: 78496 - DNA, 20 bp, Artificial Sequence
  Description of Artificial Sequence: Synthetic oligonucleotide
  Target: SCNA; (+) strand; PAM type: YTN; PAM sequence: CTA
taaccagagatttttgaaaa

SEQ ID NO: 78497 - DNA, 20 bp, Artificial Sequence
  Description of Artificial Sequence: Synthetic oligonucleotide
  Target: SCNA; (+) strand; PAM type: YTN; PAM sequence: TTT
ttgaaaaataatgagactgt

SEQ ID NO: 78498 - DNA, 20 bp, Artificial Sequence
  Description of Artificial Sequence: Synthetic oligonucleotide
  Target: SCNA; (+) strand; PAM type: YTN; PAM sequence: TTT
tgaaaaataatgagactgta

SEQ ID NO: 78499 - DNA, 20 bp, Artificial Sequence
  Description of Artificial Sequence: Synthetic oligonucleotide
  Target: SCNA; (+) strand; PAM type: YTN; PAM sequence: TTT
gaaaaataatgagactgtat

SEQ ID NO: 78500 - DNA, 20 bp, Artificial Sequence
  Description of Artificial Sequence: Synthetic oligonucleotide
  Target: SCNA; (+) strand; PAM type: YTN; PAM sequence: TTG
aaaaataatgagactgtatg

SEQ ID NO: 78501 - DNA, 20 bp, Artificial Sequence
  Description of Artificial Sequence: Synthetic oligonucleotide
  Target: SCNA; (+) strand; PAM type: YTN; PAM sequence: CTG
tatgtactatgatacttcac

SEQ ID NO: 78502 - DNA, 20 bp, Artificial Sequence
  Description of Artificial Sequence: Synthetic oligonucleotide
  Target: SCNA; (+) strand; PAM type: YTN; PAM sequence: CTA
tgatacttcactcagaaaac

SEQ ID NO: 78503 - DNA, 20 bp, Artificial Sequence
  Description of Artificial Sequence: Synthetic oligonucleotide
  Target: SCNA; (+) strand; PAM type: YTN; PAM sequence: CTT
cactcagaaaacctcacttc

SEQ ID NO: 78504 - DNA, 20 bp, Artificial Sequence
  Description of Artificial Sequence: Synthetic oligonucleotide
  Target: SCNA; (+) strand; PAM type: YTN; PAM sequence: TTC
actcagaaaacctcacttca

SEQ ID NO: 78505 - DNA, 20 bp, Artificial Sequence
  Description of Artificial Sequence: Synthetic oligonucleotide
  Target: SCNA; (+) strand; PAM type: YTN; PAM sequence: CTC
agaaaacctcacttcaaact

SEQ ID NO: 78506 - DNA, 20 bp, Artificial Sequence
  Description of Artificial Sequence: Synthetic oligonucleotide
  Target: SCNA; (+) strand; PAM type: YTN; PAM sequence: CTC
acttcaaacttaatgggaag

SEQ ID NO: 78507 - DNA, 20 bp, Artificial Sequence
  Description of Artificial Sequence: Synthetic oligonucleotide
  Target: SCNA; (+) strand; PAM type: YTN; PAM sequence: CTT
caaacttaatgggaagagaa

SEQ ID NO: 78508 - DNA, 20 bp, Artificial Sequence
  Description of Artificial Sequence: Synthetic oligonucleotide
  Target: SCNA; (+) strand; PAM type: YTN; PAM sequence: TTC
aaacttaatgggaagagaaa

SEQ ID NO: 78509 - DNA, 20 bp, Artificial Sequence
  Description of Artificial Sequence: Synthetic oligonucleotide
  Target: SCNA; (+) strand; PAM type: YTN; PAM sequence: CTT
aatgggaagagaaaaagatt

SEQ ID NO: 78510 - DNA, 20 bp, Artificial Sequence
  Description of Artificial Sequence: Synthetic oligonucleotide
  Target: SCNA; (+) strand; PAM type: YTN; PAM sequence: TTA
atgggaagagaaaaagattg

SEQ ID NO: 78511 - DNA, 20 bp, Artificial Sequence
  Description of Artificial Sequence: Synthetic oligonucleotide
  Target: SCNA; (+) strand; PAM type: YTN; PAM sequence: TTG
gggaagaagtcttcaagcac

SEQ ID NO: 78512 - DNA, 20 bp, Artificial Sequence
  Description of Artificial Sequence: Synthetic oligonucleotide
  Target: SCNA; (+) strand; PAM type: YTN; PAM sequence: CTT
caagcacagtccataatatt

SEQ ID NO: 78513 - DNA, 20 bp, Artificial Sequence
  Description of Artificial Sequence: Synthetic oligonucleotide
  Target: SCNA; (+) strand; PAM type: YTN; PAM sequence: TTC
aagcacagtccataatattg

SEQ ID NO: 78514 - DNA, 20 bp, Artificial Sequence
  Description of Artificial Sequence: Synthetic oligonucleotide
  Target: SCNA; (+) strand; PAM type: YTN; PAM sequence: TTG
atagatagactcctacacat

SEQ ID NO: 78515 - DNA, 20 bp, Artificial Sequence
  Description of Artificial Sequence: Synthetic oligonucleotide
  Target: SCNA; (+) strand; PAM type: YTN; PAM sequence: CTC
ctacacatattaatggttga

SEQ ID NO: 78516 - DNA, 20 bp, Artificial Sequence
  Description of Artificial Sequence: Synthetic oligonucleotide
  Target: SCNA; (+) strand; PAM type: YTN; PAM sequence: CTA
cacatattaatggttgacag

SEQ ID NO: 78517 - DNA, 20 bp, Artificial Sequence
  Description of Artificial Sequence: Synthetic oligonucleotide
  Target: SCNA; (+) strand; PAM type: YTN; PAM sequence: TTA
atggttgacagctagatgtc

SEQ ID NO: 78518 - DNA, 20 bp, Artificial Sequence
  Description of Artificial Sequence: Synthetic oligonucleotide
  Target: SCNA; (+) strand; PAM type: YTN; PAM sequence: TTG
acagctagatgtcaatgcct

SEQ ID NO: 78519 - DNA, 20 bp, Artificial Sequence
  Description of Artificial Sequence: Synthetic oligonucleotide
  Target: SCNA; (+) strand; PAM type: YTN; PAM sequence: CTA
gatgtcaatgcctagagcac

SEQ ID NO: 78520 - DNA, 20 bp, Artificial Sequence
  Description of Artificial Sequence: Synthetic oligonucleotide
  Target: SCNA; (+) strand; PAM type: YTN; PAM sequence: CTA
gagcacaacaaataggtctt

SEQ ID NO: 78521 - DNA, 20 bp, Artificial Sequence
  Description of Artificial Sequence: Synthetic oligonucleotide
  Target: SCNA; (+) strand; PAM type: YTN; PAM sequence: CTT
atatatcactatatttttta

SEQ ID NO: 78522 - DNA, 20 bp, Artificial Sequence
  Description of Artificial Sequence: Synthetic oligonucleotide
  Target: SCNA; (+) strand; PAM type: YTN; PAM sequence: TTA
tatatcactatattttttat

SEQ ID NO: 78523 - DNA, 20 bp, Artificial Sequence
  Description of Artificial Sequence: Synthetic oligonucleotide
  Target: SCNA; (+) strand; PAM type: YTN; PAM sequence: CTA
tattttttatgatgcttggc

SEQ ID NO: 78524 - DNA, 20 bp, Artificial Sequence
  Description of Artificial Sequence: Synthetic oligonucleotide
  Target: SCNA; (+) strand; PAM type: YTN; PAM sequence: TTT
tttatgatgcttggcattgt

SEQ ID NO: 78525 - DNA, 20 bp, Artificial Sequence
  Description of Artificial Sequence: Synthetic oligonucleotide
  Target: SCNA; (+) strand; PAM type: YTN; PAM sequence: TTT
ttatgatgcttggcattgta

SEQ ID NO: 78526 - DNA, 20 bp, Artificial Sequence
  Description of Artificial Sequence: Synthetic oligonucleotide
  Target: SCNA; (+) strand; PAM type: YTN; PAM sequence: TTT
tatgatgcttggcattgtat

SEQ ID NO: 78527 - DNA, 20 bp, Artificial Sequence
  Description of Artificial Sequence: Synthetic oligonucleotide
  Target: SCNA; (+) strand; PAM type: YTN; PAM sequence: TTT
atgatgcttggcattgtatt

SEQ ID NO: 78528 - DNA, 20 bp, Artificial Sequence
  Description of Artificial Sequence: Synthetic oligonucleotide
  Target: SCNA; (+) strand; PAM type: YTN; PAM sequence: TTA
tgatgcttggcattgtattt

SEQ ID NO: 78529 - DNA, 20 bp, Artificial Sequence
  Description of Artificial Sequence: Synthetic oligonucleotide
  Target: SCNA; (+) strand; PAM type: YTN; PAM sequence: CTT
ggcattgtattttttttgtt

SEQ ID NO: 78530 - DNA, 20 bp, Artificial Sequence
  Description of Artificial Sequence: Synthetic oligonucleotide
  Target: SCNA; (+) strand; PAM type: YTN; PAM sequence: TTG
gcattgtattttttttgttt

SEQ ID NO: 78531 - DNA, 20 bp, Artificial Sequence
  Description of Artificial Sequence: Synthetic oligonucleotide
  Target: SCNA; (+) strand; PAM type: YTN; PAM sequence: TTG
tattttttttgtttgttttt

SEQ ID NO: 78532 - DNA, 20 bp, Artificial Sequence
  Description of Artificial Sequence: Synthetic oligonucleotide
  Target: SCNA; (+) strand; PAM type: YTN; PAM sequence: TTT
tttttgtttgtttttgagac

SEQ ID NO: 78533 - DNA, 20 bp, Artificial Sequence
  Description of Artificial Sequence: Synthetic oligonucleotide
  Target: SCNA; (+) strand; PAM type: YTN; PAM sequence: TTT
ttttgtttgtttttgagacg

SEQ ID NO: 78534 - DNA, 20 bp, Artificial Sequence
  Description of Artificial Sequence: Synthetic oligonucleotide
  Target: SCNA; (+) strand; PAM type: YTN; PAM sequence: TTT
tttgtttgtttttgagacgg

SEQ ID NO: 78535 - DNA, 20 bp, Artificial Sequence
  Description of Artificial Sequence: Synthetic oligonucleotide
  Target: SCNA; (+) strand; PAM type: YTN; PAM sequence: TTT
ttgtttgtttttgagacgga

SEQ ID NO: 78536 - DNA, 20 bp, Artificial Sequence
  Description of Artificial Sequence: Synthetic oligonucleotide
  Target: SCNA; (+) strand; PAM type: YTN; PAM sequence: TTT
tgtttgtttttgagacggag

SEQ ID NO: 78537 - DNA, 20 bp, Artificial Sequence
  Description of Artificial Sequence: Synthetic oligonucleotide
  Target: SCNA; (+) strand; PAM type: YTN; PAM sequence: TTT
gtttgtttttgagacggagt

SEQ ID NO: 78538 - DNA, 20 bp, Artificial Sequence
  Description of Artificial Sequence: Synthetic oligonucleotide
  Target: SCNA; (+) strand; PAM type: YTN; PAM sequence: TTG
tttgtttttgagacggagtc

SEQ ID NO: 78539 - DNA, 20 bp, Artificial Sequence
  Description of Artificial Sequence: Synthetic oligonucleotide
  Target: SCNA; (+) strand; PAM type: YTN; PAM sequence: TTT
gtttttgagacggagtcttg

SEQ ID NO: 78540 - DNA, 20 bp, Artificial Sequence
  Description of Artificial Sequence: Synthetic oligonucleotide
  Target: SCNA; (+) strand; PAM type: YTN; PAM sequence: TTG
tttttgagacggagtcttgc

SEQ ID NO: 78541 - DNA, 20 bp, Artificial Sequence
  Description of Artificial Sequence: Synthetic oligonucleotide
  Target: SCNA; (+) strand; PAM type: YTN; PAM sequence: TTT
ttgagacggagtcttgctct

SEQ ID NO: 78542 - DNA, 20 bp, Artificial Sequence
  Description of Artificial Sequence: Synthetic oligonucleotide
  Target: SCNA; (+) strand; PAM type: YTN; PAM sequence: TTT
tgagacggagtcttgctctg

SEQ ID NO: 78543 - DNA, 20 bp, Artificial Sequence
  Description of Artificial Sequence: Synthetic oligonucleotide
  Target: SCNA; (+) strand; PAM type: YTN; PAM sequence: TTT
gagacggagtcttgctctgt

SEQ ID NO: 78544 - DNA, 20 bp, Artificial Sequence
  Description of Artificial Sequence: Synthetic oligonucleotide
  Target: SCNA; (+) strand; PAM type: YTN; PAM sequence: TTG
agacggagtcttgctctgtc

SEQ ID NO: 78545 - DNA, 20 bp, Artificial Sequence
  Description of Artificial Sequence: Synthetic oligonucleotide
  Target: SCNA; (+) strand; PAM type: YTN; PAM sequence: CTT
gctctgtcacccaggctgga

SEQ ID NO: 78546 - DNA, 20 bp, Artificial Sequence
  Description of Artificial Sequence: Synthetic oligonucleotide
  Target: SCNA; (+) strand; PAM type: YTN; PAM sequence: TTG
ctctgtcacccaggctggag

SEQ ID NO: 78547 - DNA, 20 bp, Artificial Sequence
  Description of Artificial Sequence: Synthetic oligonucleotide
  Target: SCNA; (+) strand; PAM type: YTN; PAM sequence: CTC
tgtcacccaggctggagtgt

SEQ ID NO: 78548 - DNA, 20 bp, Artificial Sequence
  Description of Artificial Sequence: Synthetic oligonucleotide
  Target: SCNA; (+) strand; PAM type: YTN; PAM sequence: CTG
tcacccaggctggagtgtat

SEQ ID NO: 78549 - DNA, 20 bp, Artificial Sequence
  Description of Artificial Sequence: Synthetic oligonucleotide
  Target: SCNA; (+) strand; PAM type: YTN; PAM sequence: CTG
gagtgtattggcatgatctc

SEQ ID NO: 78550 - DNA, 20 bp, Artificial Sequence
  Description of Artificial Sequence: Synthetic oligonucleotide
  Target: SCNA; (+) strand; PAM type: YTN; PAM sequence: TTG
gcatgatctcagctcactgc

SEQ ID NO: 78551 - DNA, 20 bp, Artificial Sequence
  Description of Artificial Sequence: Synthetic oligonucleotide
  Target: SCNA; (+) strand; PAM type: YTN; PAM sequence: CTC
agctcactgcaaactccatc

SEQ ID NO: 78552 - DNA, 20 bp, Artificial Sequence
  Description of Artificial Sequence: Synthetic oligonucleotide
  Target: SCNA; (+) strand; PAM type: YTN; PAM sequence: CTC
actgcaaactccatctcctg

SEQ ID NO: 78553 - DNA, 20 bp, Artificial Sequence
  Description of Artificial Sequence: Synthetic oligonucleotide
  Target: SCNA; (+) strand; PAM type: YTN; PAM sequence: CTG
caaactccatctcctgggtt

SEQ ID NO: 78554 - DNA, 20 bp, Artificial Sequence
  Description of Artificial Sequence: Synthetic oligonucleotide
  Target: SCNA; (+) strand; PAM type: YTN; PAM sequence: CTC
catctcctgggttcgagcga

SEQ ID NO: 78555 - DNA, 20 bp, Artificial Sequence
  Description of Artificial Sequence: Synthetic oligonucleotide
  Target: SCNA; (+) strand; PAM type: YTN; PAM sequence: CTC
ctgggttcgagcgattctcc

SEQ ID NO: 78556 - DNA, 20 bp, Artificial Sequence
  Description of Artificial Sequence: Synthetic oligonucleotide
  Target: SCNA; (+) strand; PAM type: YTN; PAM sequence: CTG
ggttcgagcgattctcctgg

SEQ ID NO: 78557 - DNA, 20 bp, Artificial Sequence
  Description of Artificial Sequence: Synthetic oligonucleotide
  Target: SCNA; (+) strand; PAM type: YTN; PAM sequence: TTC
gagcgattctcctggttcag

SEQ ID NO: 78558 - DNA, 20 bp, Artificial Sequence
  Description of Artificial Sequence: Synthetic oligonucleotide
  Target: SCNA; (+) strand; PAM type: YTN; PAM sequence: TTC
tcctggttcagcctcctaag

SEQ ID NO: 78559 - DNA, 20 bp, Artificial Sequence
  Description of Artificial Sequence: Synthetic oligonucleotide
  Target: SCNA; (+) strand; PAM type: YTN; PAM sequence: CTC
ctggttcagcctcctaagta

SEQ ID NO: 78560 - DNA, 20 bp, Artificial Sequence
  Description of Artificial Sequence: Synthetic oligonucleotide
  Target: SCNA; (+) strand; PAM type: YTN; PAM sequence: CTG
gttcagcctcctaagtagct

SEQ ID NO: 78561 - DNA, 20 bp, Artificial Sequence
  Description of Artificial Sequence: Synthetic oligonucleotide
  Target: SCNA; (+) strand; PAM type: YTN; PAM sequence: TTC
agcctcctaagtagctggga

SEQ ID NO: 78562 - DNA, 20 bp, Artificial Sequence
  Description of Artificial Sequence: Synthetic oligonucleotide
  Target: SCNA; (+) strand; PAM type: YTN; PAM sequence: CTC
ctaagtagctgggattagag

SEQ ID NO: 78563 - DNA, 20 bp, Artificial Sequence
  Description of Artificial Sequence: Synthetic oligonucleotide
  Target: SCNA; (+) strand; PAM type: YTN; PAM sequence: CTA
agtagctgggattagagtcg

SEQ ID NO: 78564 - DNA, 20 bp, Artificial Sequence
  Description of Artificial Sequence: Synthetic oligonucleotide
  Target: SCNA; (+) strand; PAM type: YTN; PAM sequence: CTG
ggattagagtcgtctgccac

SEQ ID NO: 78565 - DNA, 20 bp, Artificial Sequence
  Description of Artificial Sequence: Synthetic oligonucleotide
  Target: SCNA; (+) strand; PAM type: YTN; PAM sequence: TTA
gagtcgtctgccaccatgcc

SEQ ID NO: 78566 - DNA, 20 bp, Artificial Sequence
  Description of Artificial Sequence: Synthetic oligonucleotide
  Target: SCNA; (+) strand; PAM type: YTN; PAM sequence: CTG
ccaccatgcctggctaattt

SEQ ID NO: 78567 - DNA, 20 bp, Artificial Sequence
  Description of Artificial Sequence: Synthetic oligonucleotide
  Target: SCNA; (+) strand; PAM type: YTN; PAM sequence: CTG
gctaatttttgtatttttag

SEQ ID NO: 78568 - DNA, 20 bp, Artificial Sequence
  Description of Artificial Sequence: Synthetic oligonucleotide
  Target: SCNA; (+) strand; PAM type: YTN; PAM sequence: CTA
atttttgtatttttagtaga

SEQ ID NO: 78569 - DNA, 20 bp, Artificial Sequence
  Description of Artificial Sequence: Synthetic oligonucleotide
  Target: SCNA; (+) strand; PAM type: YTN; PAM sequence: TTT
ttgtatttttagtagagaca

SEQ ID NO: 78570 - DNA, 20 bp, Artificial Sequence
  Description of Artificial Sequence: Synthetic oligonucleotide
  Target: SCNA; (+) strand; PAM type: YTN; PAM sequence: TTT
tgtatttttagtagagacag

SEQ ID NO: 78571 - DNA, 20 bp, Artificial Sequence
  Description of Artificial Sequence: Synthetic oligonucleotide
  Target: SCNA; (+) strand; PAM type: YTN; PAM sequence: TTT
gtatttttagtagagacagg

SEQ ID NO: 78572 - DNA, 20 bp, Artificial Sequence
  Description of Artificial Sequence: Synthetic oligonucleotide
  Target: SCNA; (+) strand; PAM type: YTN; PAM sequence: TTG
tatttttagtagagacaggg

SEQ ID NO: 78573 - DNA, 20 bp, Artificial Sequence
  Description of Artificial Sequence: Synthetic oligonucleotide
  Target: SCNA; (+) strand; PAM type: YTN; PAM sequence: TTT
ttagtagagacagggttttt

SEQ ID NO: 78574 - DNA, 20 bp, Artificial Sequence
  Description of Artificial Sequence: Synthetic oligonucleotide
  Target: SCNA; (+) strand; PAM type: YTN; PAM sequence: TTT
tagtagagacagggtttttc

SEQ ID NO: 78575 - DNA, 20 bp, Artificial Sequence
  Description of Artificial Sequence: Synthetic oligonucleotide
  Target: SCNA; (+) strand; PAM type: YTN; PAM sequence: TTT
agtagagacagggtttttcc

SEQ ID NO: 78576 - DNA, 20 bp, Artificial Sequence
  Description of Artificial Sequence: Synthetic oligonucleotide
  Target: SCNA; (+) strand; PAM type: YTN; PAM sequence: TTA
gtagagacagggtttttcca

SEQ ID NO: 78577 - DNA, 20 bp, Artificial Sequence
  Description of Artificial Sequence: Synthetic oligonucleotide
  Target: SCNA; (+) strand; PAM type: YTN; PAM sequence: TTT
ttccacgttggccaggctgg

SEQ ID NO: 78578 - DNA, 20 bp, Artificial Sequence
  Description of Artificial Sequence: Synthetic oligonucleotide
  Target: SCNA; (+) strand; PAM type: YTN; PAM sequence: TTT
tccacgttggccaggctggt

SEQ ID NO: 78579 - DNA, 20 bp, Artificial Sequence
  Description of Artificial Sequence: Synthetic oligonucleotide
  Target: SCNA; (+) strand; PAM type: YTN; PAM sequence: TTT
ccacgttggccaggctggtc

SEQ ID NO: 78580 - DNA, 20 bp, Artificial Sequence
  Description of Artificial Sequence: Synthetic oligonucleotide
  Target: SCNA; (+) strand; PAM type: YTN; PAM sequence: TTC
cacgttggccaggctggtct

SEQ ID NO: 78581 - DNA, 20 bp, Artificial Sequence
  Description of Artificial Sequence: Synthetic oligonucleotide
  Target: SCNA; (+) strand; PAM type: YTN; PAM sequence: TTG
gccaggctggtctcaaacac

SEQ ID NO: 78582 - DNA, 20 bp, Artificial Sequence
  Description of Artificial Sequence: Synthetic oligonucleotide
  Target: SCNA; (+) strand; PAM type: YTN; PAM sequence: CTG
gtctcaaacacctgacttca

SEQ ID NO: 78583 - DNA, 20 bp, Artificial Sequence
  Description of Artificial Sequence: Synthetic oligonucleotide
  Target: SCNA; (+) strand; PAM type: YTN; PAM sequence: CTC
aaacacctgacttcaggtga

SEQ ID NO: 78584 - DNA, 20 bp, Artificial Sequence
  Description of Artificial Sequence: Synthetic oligonucleotide
  Target: SCNA; (+) strand; PAM type: YTN; PAM sequence: CTG
acttcaggtgatccacccgc

SEQ ID NO: 78585 - DNA, 20 bp, Artificial Sequence
  Description of Artificial Sequence: Synthetic oligonucleotide
  Target: SCNA; (+) strand; PAM type: YTN; PAM sequence: CTT
caggtgatccacccgccttg

SEQ ID NO: 78586 - DNA, 20 bp, Artificial Sequence
  Description of Artificial Sequence: Synthetic oligonucleotide
  Target: SCNA; (+) strand; PAM type: YTN; PAM sequence: TTC
aggtgatccacccgccttgg

SEQ ID NO: 78587 - DNA, 20 bp, Artificial Sequence
  Description of Artificial Sequence: Synthetic oligonucleotide
  Target: SCNA; (+) strand; PAM type: YTN; PAM sequence: CTT
ggcctcccaaagtcctggaa

SEQ ID NO: 78588 - DNA, 20 bp, Artificial Sequence
  Description of Artificial Sequence: Synthetic oligonucleotide
  Target: SCNA; (+) strand; PAM type: YTN; PAM sequence: TTG
gcctcccaaagtcctggaat

SEQ ID NO: 78589 - DNA, 20 bp, Artificial Sequence
  Description of Artificial Sequence: Synthetic oligonucleotide
  Target: SCNA; (+) strand; PAM type: YTN; PAM sequence: CTC
ccaaagtcctggaattacag

SEQ ID NO: 78590 - DNA, 20 bp, Artificial Sequence
  Description of Artificial Sequence: Synthetic oligonucleotide
  Target: SCNA; (+) strand; PAM type: YTN; PAM sequence: CTG
gaattacaggcgtgagccac

SEQ ID NO: 78591 - DNA, 20 bp, Artificial Sequence
  Description of Artificial Sequence: Synthetic oligonucleotide
  Target: SCNA; (+) strand; PAM type: YTN; PAM sequence: TTA
caggcgtgagccaccgcacc

SEQ ID NO: 78592 - DNA, 20 bp, Artificial Sequence
  Description of Artificial Sequence: Synthetic oligonucleotide
  Target: SCNA; (+) strand; PAM type: YTN; PAM sequence: CTG
gtgtagtattttatacacag

SEQ ID NO: 78593 - DNA, 20 bp, Artificial Sequence
  Description of Artificial Sequence: Synthetic oligonucleotide
  Target: SCNA; (+) strand; PAM type: YTN; PAM sequence: TTT
tatacacagcatgcatcaac

SEQ ID NO: 78594 - DNA, 20 bp, Artificial Sequence
  Description of Artificial Sequence: Synthetic oligonucleotide
  Target: SCNA; (+) strand; PAM type: YTN; PAM sequence: TTT
atacacagcatgcatcaaca

SEQ ID NO: 78595 - DNA, 20 bp, Artificial Sequence
  Description of Artificial Sequence: Synthetic oligonucleotide
  Target: SCNA; (+) strand; PAM type: YTN; PAM sequence: TTA
tacacagcatgcatcaacaa

SEQ ID NO: 78596 - DNA, 20 bp, Artificial Sequence
  Description of Artificial Sequence: Synthetic oligonucleotide
  Target: SCNA; (+) strand; PAM type: YTN; PAM sequence: TTG
aaagaataaatagcagaaat

SEQ ID NO: 78597 - DNA, 20 bp, Artificial Sequence
  Description of Artificial Sequence: Synthetic oligonucleotide
  Target: SCNA; (+) strand; PAM type: YTN; PAM sequence: CTC
taacttttaagagtctatca

SEQ ID NO: 78598 - DNA, 20 bp, Artificial Sequence
  Description of Artificial Sequence: Synthetic oligonucleotide
  Target: SCNA; (+) strand; PAM type: YTN; PAM sequence: CTA
acttttaagagtctatcaag

SEQ ID NO: 78599 - DNA, 20 bp, Artificial Sequence
  Description of Artificial Sequence: Synthetic oligonucleotide
  Target: SCNA; (+) strand; PAM type: YTN; PAM sequence: CTT
ttaagagtctatcaagctaa

SEQ ID NO: 78600 - DNA, 20 bp, Artificial Sequence
  Description of Artificial Sequence: Synthetic oligonucleotide
  Target: SCNA; (+) strand; PAM type: YTN; PAM sequence: TTT
taagagtctatcaagctaaa

SEQ ID NO: 78601 - DNA, 20 bp, Artificial Sequence
  Description of Artificial Sequence: Synthetic oligonucleotide
  Target: SCNA; (+) strand; PAM type: YTN; PAM sequence: TTT
aagagtctatcaagctaaaa

SEQ ID NO: 78602 - DNA, 20 bp, Artificial Sequence
  Description of Artificial Sequence: Synthetic oligonucleotide
  Target: SCNA; (+) strand; PAM type: YTN; PAM sequence: TTA
agagtctatcaagctaaaat

SEQ ID NO: 78603 - DNA, 20 bp, Artificial Sequence
  Description of Artificial Sequence: Synthetic oligonucleotide
  Target: SCNA; (+) strand; PAM type: YTN; PAM sequence: CTA
tcaagctaaaatgacttttg

SEQ ID NO: 78604 - DNA, 20 bp, Artificial Sequence
  Description of Artificial Sequence: Synthetic oligonucleotide
  Target: SCNA; (+) strand; PAM type: YTN; PAM sequence: CTA
aaatgacttttgaatcagtc

SEQ ID NO: 78605 - DNA, 20 bp, Artificial Sequence
  Description of Artificial Sequence: Synthetic oligonucleotide
  Target: SCNA; (+) strand; PAM type: YTN; PAM sequence: CTT
ttgaatcagtcgaatgaatg

SEQ ID NO: 78606 - DNA, 20 bp, Artificial Sequence
  Description of Artificial Sequence: Synthetic oligonucleotide
  Target: SCNA; (+) strand; PAM type: YTN; PAM sequence: TTT
tgaatcagtcgaatgaatgt

SEQ ID NO: 78607 - DNA, 20 bp, Artificial Sequence
  Description of Artificial Sequence: Synthetic oligonucleotide
  Target: SCNA; (+) strand; PAM type: YTN; PAM sequence: TTT
gaatcagtcgaatgaatgta

SEQ ID NO: 78608 - DNA, 20 bp, Artificial Sequence
  Description of Artificial Sequence: Synthetic oligonucleotide
  Target: SCNA; (+) strand; PAM type: YTN; PAM sequence: TTG
aatcagtcgaatgaatgtac

SEQ ID NO: 78609 - DNA, 20 bp, Artificial Sequence
  Description of Artificial Sequence: Synthetic oligonucleotide
  Target: SCNA; (+) strand; PAM type: YTN; PAM sequence: CTG
ggaacttaagaaagagaagg

SEQ ID NO: 78610 - DNA, 20 bp, Artificial Sequence
  Description of Artificial Sequence: Synthetic oligonucleotide
  Target: SCNA; (+) strand; PAM type: YTN; PAM sequence: CTT
aagaaagagaaggagcataa

SEQ ID NO: 78611 - DNA, 20 bp, Artificial Sequence
  Description of Artificial Sequence: Synthetic oligonucleotide
  Target: SCNA; (+) strand; PAM type: YTN; PAM sequence: TTA
agaaagagaaggagcataaa

SEQ ID NO: 78612 - DNA, 20 bp, Artificial Sequence
  Description of Artificial Sequence: Synthetic oligonucleotide
  Target: SCNA; (+) strand; PAM type: YTN; PAM sequence: TTG
caattgtggctaaagcagca

SEQ ID NO: 78613 - DNA, 20 bp, Artificial Sequence
  Description of Artificial Sequence: Synthetic oligonucleotide
  Target: SCNA; (+) strand; PAM type: YTN; PAM sequence: TTG
tggctaaagcagcagaatgc

SEQ ID NO: 78614 - DNA, 20 bp, Artificial Sequence
  Description of Artificial Sequence: Synthetic oligonucleotide
  Target: SCNA; (+) strand; PAM type: YTN; PAM sequence: CTA
aagcagcagaatgcttattt

SEQ ID NO: 78615 - DNA, 20 bp, Artificial Sequence
  Description of Artificial Sequence: Synthetic oligonucleotide
  Target: SCNA; (+) strand; PAM type: YTN; PAM sequence: CTT
atttacataagttttaacca

SEQ ID NO: 78616 - DNA, 20 bp, Artificial Sequence
  Description of Artificial Sequence: Synthetic oligonucleotide
  Target: SCNA; (+) strand; PAM type: YTN; PAM sequence: TTA
tttacataagttttaaccag

SEQ ID NO: 78617 - DNA, 20 bp, Artificial Sequence
  Description of Artificial Sequence: Synthetic oligonucleotide
  Target: SCNA; (+) strand; PAM type: YTN; PAM sequence: TTT
acataagttttaaccagtgc

SEQ ID NO: 78618 - DNA, 20 bp, Artificial Sequence
  Description of Artificial Sequence: Synthetic oligonucleotide
  Target: SCNA; (+) strand; PAM type: YTN; PAM sequence: TTA
cataagttttaaccagtgcg

SEQ ID NO: 78619 - DNA, 20 bp, Artificial Sequence
  Description of Artificial Sequence: Synthetic oligonucleotide
  Target: SCNA; (+) strand; PAM type: YTN; PAM sequence: TTT
taaccagtgcggaatattgt

SEQ ID NO: 78620 - DNA, 20 bp, Artificial Sequence
  Description of Artificial Sequence: Synthetic oligonucleotide
  Target: SCNA; (+) strand; PAM type: YTN; PAM sequence: TTT
aaccagtgcggaatattgta

SEQ ID NO: 78621 - DNA, 20 bp, Artificial Sequence
  Description of Artificial Sequence: Synthetic oligonucleotide
  Target: SCNA; (+) strand; PAM type: YTN; PAM sequence: TTA
accagtgcggaatattgtaa

SEQ ID NO: 78622 - DNA, 20 bp, Artificial Sequence
  Description of Artificial Sequence: Synthetic oligonucleotide
  Target: SCNA; (+) strand; PAM type: YTN; PAM sequence: TTG
taattaccatttatgttgtt

SEQ ID NO: 78623 - DNA, 20 bp, Artificial Sequence
  Description of Artificial Sequence: Synthetic oligonucleotide
  Target: SCNA; (+) strand; PAM type: YTN; PAM sequence: TTA
ccatttatgttgttttttta

SEQ ID NO: 78624 - DNA, 20 bp, Artificial Sequence
  Description of Artificial Sequence: Synthetic oligonucleotide
  Target: SCNA; (+) strand; PAM type: YTN; PAM sequence: TTT
atgttgtttttttatgaatc

SEQ ID NO: 78625 - DNA, 20 bp, Artificial Sequence
  Description of Artificial Sequence: Synthetic oligonucleotide
  Target: SCNA; (+) strand; PAM type: YTN; PAM sequence: TTA
tgttgtttttttatgaatcc

SEQ ID NO: 78626 - DNA, 20 bp, Artificial Sequence
  Description of Artificial Sequence: Synthetic oligonucleotide
  Target: SCNA; (+) strand; PAM type: YTN; PAM sequence: TTG
tttttttatgaatccagtac

SEQ ID NO: 78627 - DNA, 20 bp, Artificial Sequence
  Description of Artificial Sequence: Synthetic oligonucleotide
  Target: SCNA; (+) strand; PAM type: YTN; PAM sequence: TTT
ttttatgaatccagtacatg

SEQ ID NO: 78628 - DNA, 20 bp, Artificial Sequence
  Description of Artificial Sequence: Synthetic oligonucleotide
  Target: SCNA; (+) strand; PAM type: YTN; PAM sequence: TTT
tttatgaatccagtacatgc

SEQ ID NO: 78629 - DNA, 20 bp, Artificial Sequence
  Description of Artificial Sequence: Synthetic oligonucleotide
  Target: SCNA; (+) strand; PAM type: YTN; PAM sequence: TTT
ttatgaatccagtacatgct

SEQ ID NO: 78630 - DNA, 20 bp, Artificial Sequence
  Description of Artificial Sequence: Synthetic oligonucleotide
  Target: SCNA; (+) strand; PAM type: YTN; PAM sequence: TTT
tatgaatccagtacatgctt

SEQ ID NO: 78631 - DNA, 20 bp, Artificial Sequence
  Description of Artificial Sequence: Synthetic oligonucleotide
  Target: SCNA; (+) strand; PAM type: YTN; PAM sequence: TTT
atgaatccagtacatgctta

SEQ ID NO: 78632 - DNA, 20 bp, Artificial Sequence
  Description of Artificial Sequence: Synthetic oligonucleotide
  Target: SCNA; (+) strand; PAM type: YTN; PAM sequence: TTA
tgaatccagtacatgcttat

SEQ ID NO: 78633 - DNA, 20 bp, Artificial Sequence
  Description of Artificial Sequence: Synthetic oligonucleotide
  Target: SCNA; (+) strand; PAM type: YTN; PAM sequence: CTT
attaaagggaattggagaaa

SEQ ID NO: 78634 - DNA, 20 bp, Artificial Sequence
  Description of Artificial Sequence: Synthetic oligonucleotide
  Target: SCNA; (+) strand; PAM type: YTN; PAM sequence: TTA
ttaaagggaattggagaaaa

SEQ ID NO: 78635 - DNA, 20 bp, Artificial Sequence
  Description of Artificial Sequence: Synthetic oligonucleotide
  Target: SCNA; (+) strand; PAM type: YTN; PAM sequence: TTA
aagggaattggagaaaataa

SEQ ID NO: 78636 - DNA, 20 bp, Artificial Sequence
  Description of Artificial Sequence: Synthetic oligonucleotide
  Target: SCNA; (+) strand; PAM type: YTN; PAM sequence: TTG
gagaaaataaaaataagaaa

SEQ ID NO: 78637 - DNA, 20 bp, Artificial Sequence
  Description of Artificial Sequence: Synthetic oligonucleotide
  Target: SCNA; (+) strand; PAM type: YTN; PAM sequence: CTG
taatctaggacccagtaata

SEQ ID NO: 78638 - DNA, 20 bp, Artificial Sequence
  Description of Artificial Sequence: Synthetic oligonucleotide
  Target: SCNA; (+) strand; PAM type: YTN; PAM sequence: CTA
ggacccagtaatagttactt

SEQ ID NO: 78639 - DNA, 20 bp, Artificial Sequence
  Description of Artificial Sequence: Synthetic oligonucleotide
  Target: SCNA; (+) strand; PAM type: YTN; PAM sequence: TTA
cttagttgcaaaatttcctc

SEQ ID NO: 78640 - DNA, 20 bp, Artificial Sequence
  Description of Artificial Sequence: Synthetic oligonucleotide
  Target: SCNA; (+) strand; PAM type: YTN; PAM sequence: CTT
agttgcaaaatttcctcaag

SEQ ID NO: 78641 - DNA, 20 bp, Artificial Sequence
  Description of Artificial Sequence: Synthetic oligonucleotide
  Target: SCNA; (+) strand; PAM type: YTN; PAM sequence: TTA
gttgcaaaatttcctcaagg

SEQ ID NO: 78642 - DNA, 20 bp, Artificial Sequence
  Description of Artificial Sequence: Synthetic oligonucleotide
  Target: SCNA; (+) strand; PAM type: YTN; PAM sequence: TTG
caaaatttcctcaagggcaa

SEQ ID NO: 78643 - DNA, 20 bp, Artificial Sequence
  Description of Artificial Sequence: Synthetic oligonucleotide
  Target: SCNA; (+) strand; PAM type: YTN; PAM sequence: TTT
cctcaagggcaatatgagag

SEQ ID NO: 78644 - DNA, 20 bp, Artificial Sequence
  Description of Artificial Sequence: Synthetic oligonucleotide
  Target: SCNA; (+) strand; PAM type: YTN; PAM sequence: TTC
ctcaagggcaatatgagaga

SEQ ID NO: 78645 - DNA, 20 bp, Artificial Sequence
  Description of Artificial Sequence: Synthetic oligonucleotide
  Target: SCNA; (+) strand; PAM type: YTN; PAM sequence: CTC
aagggcaatatgagagagac

SEQ ID NO: 78646 - DNA, 20 bp, Artificial Sequence
  Description of Artificial Sequence: Synthetic oligonucleotide
  Target: SCNA; (+) strand; PAM type: YTN; PAM sequence: TTT
tgtgcttgttgccatgctgg

SEQ ID NO: 78647 - DNA, 20 bp, Artificial Sequence
  Description of Artificial Sequence: Synthetic oligonucleotide
  Target: SCNA; (+) strand; PAM type: YTN; PAM sequence: TTT
gtgcttgttgccatgctggg

SEQ ID NO: 78648 - DNA, 20 bp, Artificial Sequence
  Description of Artificial Sequence: Synthetic oligonucleotide
  Target: SCNA; (+) strand; PAM type: YTN; PAM sequence: TTG
tgcttgttgccatgctgggg

SEQ ID NO: 78649 - DNA, 20 bp, Artificial Sequence
  Description of Artificial Sequence: Synthetic oligonucleotide
  Target: SCNA; (+) strand; PAM type: YTN; PAM sequence: CTT
gttgccatgctgggggtgcc

SEQ ID NO: 78650 - DNA, 20 bp, Artificial Sequence
  Description of Artificial Sequence: Synthetic oligonucleotide
  Target: SCNA; (+) strand; PAM type: YTN; PAM sequence: TTG
ttgccatgctgggggtgcct

SEQ ID NO: 78651 - DNA, 20 bp, Artificial Sequence
  Description of Artificial Sequence: Synthetic oligonucleotide
  Target: SCNA; (+) strand; PAM type: YTN; PAM sequence: TTG
ccatgctgggggtgcctact

SEQ ID NO: 78652 - DNA, 20 bp, Artificial Sequence
  Description of Artificial Sequence: Synthetic oligonucleotide
  Target: SCNA; (+) strand; PAM type: YTN; PAM sequence: CTG
ggggtgcctactggcgttaa

SEQ ID NO: 78653 - DNA, 20 bp, Artificial Sequence
  Description of Artificial Sequence: Synthetic oligonucleotide
  Target: SCNA; (+) strand; PAM type: YTN; PAM sequence: CTA
ctggcgttaaagaggtaagg

SEQ ID NO: 78654 - DNA, 20 bp, Artificial Sequence
  Description of Artificial Sequence: Synthetic oligonucleotide
  Target: SCNA; (+) strand; PAM type: YTN; PAM sequence: CTG
gcgttaaagaggtaaggccc

SEQ ID NO: 78655 - DNA, 20 bp, Artificial Sequence
  Description of Artificial Sequence: Synthetic oligonucleotide
  Target: SCNA; (+) strand; PAM type: YTN; PAM sequence: TTA
aagaggtaaggcccagggct

SEQ ID NO: 78656 - DNA, 20 bp, Artificial Sequence
  Description of Artificial Sequence: Synthetic oligonucleotide
  Target: SCNA; (+) strand; PAM type: YTN; PAM sequence: CTT
gtaaacatcctacaatgaat

SEQ ID NO: 78657 - DNA, 20 bp, Artificial Sequence
  Description of Artificial Sequence: Synthetic oligonucleotide
  Target: SCNA; (+) strand; PAM type: YTN; PAM sequence: TTG
taaacatcctacaatgaatg

SEQ ID NO: 78658 - DNA, 20 bp, Artificial Sequence
  Description of Artificial Sequence: Synthetic oligonucleotide
  Target: SCNA; (+) strand; PAM type: YTN; PAM sequence: CTA
caatgaatgagagttctcca

SEQ ID NO: 78659 - DNA, 20 bp, Artificial Sequence
  Description of Artificial Sequence: Synthetic oligonucleotide
  Target: SCNA; (+) strand; PAM type: YTN; PAM sequence: TTC
tccacagcgaagaattaccc

SEQ ID NO: 78660 - DNA, 20 bp, Artificial Sequence
  Description of Artificial Sequence: Synthetic oligonucleotide
  Target: SCNA; (+) strand; PAM type: YTN; PAM sequence: CTC
cacagcgaagaattacccag

SEQ ID NO: 78661 - DNA, 20 bp, Artificial Sequence
  Description of Artificial Sequence: Synthetic oligonucleotide
  Target: SCNA; (+) strand; PAM type: YTN; PAM sequence: TTA
cccagcccaaaatgcaaaat

SEQ ID NO: 78662 - DNA, 20 bp, Artificial Sequence
  Description of Artificial Sequence: Synthetic oligonucleotide
  Target: SCNA; (+) strand; PAM type: YTN; PAM sequence: CTT
cactgagaaaaactgagtac

SEQ ID NO: 78663 - DNA, 20 bp, Artificial Sequence
  Description of Artificial Sequence: Synthetic oligonucleotide
  Target: SCNA; (+) strand; PAM type: YTN; PAM sequence: TTC
actgagaaaaactgagtacc

SEQ ID NO: 78664 - DNA, 20 bp, Artificial Sequence
  Description of Artificial Sequence: Synthetic oligonucleotide
  Target: SCNA; (+) strand; PAM type: YTN; PAM sequence: CTG
agaaaaactgagtaccttgt

SEQ ID NO: 78665 - DNA, 20 bp, Artificial Sequence
  Description of Artificial Sequence: Synthetic oligonucleotide
  Target: SCNA; (+) strand; PAM type: YTN; PAM sequence: CTG
agtaccttgtgcatttattc

SEQ ID NO: 78666 - DNA, 20 bp, Artificial Sequence
  Description of Artificial Sequence: Synthetic oligonucleotide
  Target: SCNA; (+) strand; PAM type: YTN; PAM sequence: CTT
gtgcatttattccacgtctt

SEQ ID NO: 78667 - DNA, 20 bp, Artificial Sequence
  Description of Artificial Sequence: Synthetic oligonucleotide
  Target: SCNA; (+) strand; PAM type: YTN; PAM sequence: TTG
tgcatttattccacgtcttt

SEQ ID NO: 78668 - DNA, 20 bp, Artificial Sequence
  Description of Artificial Sequence: Synthetic oligonucleotide
  Target: SCNA; (+) strand; PAM type: YTN; PAM sequence: TTT
attccacgtctttatatgta

SEQ ID NO: 78669 - DNA, 20 bp, Artificial Sequence
  Description of Artificial Sequence: Synthetic oligonucleotide
  Target: SCNA; (+) strand; PAM type: YTN; PAM sequence: TTA
ttccacgtctttatatgtac

SEQ ID NO: 78670 - DNA, 20 bp, Artificial Sequence
  Description of Artificial Sequence: Synthetic oligonucleotide
  Target: SCNA; (+) strand; PAM type: YTN; PAM sequence: TTC
cacgtctttatatgtacata

SEQ ID NO: 78671 - DNA, 20 bp, Artificial Sequence
  Description of Artificial Sequence: Synthetic oligonucleotide
  Target: SCNA; (+) strand; PAM type: YTN; PAM sequence: CTT
tatatgtacataagccacat

SEQ ID NO: 78672 - DNA, 20 bp, Artificial Sequence
  Description of Artificial Sequence: Synthetic oligonucleotide
  Target: SCNA; (+) strand; PAM type: YTN; PAM sequence: TTT
atatgtacataagccacata

SEQ ID NO: 78673 - DNA, 20 bp, Artificial Sequence
  Description of Artificial Sequence: Synthetic oligonucleotide
  Target: SCNA; (+) strand; PAM type: YTN; PAM sequence: TTA
tatgtacataagccacatac

SEQ ID NO: 78674 - DNA, 20 bp, Artificial Sequence
  Description of Artificial Sequence: Synthetic oligonucleotide
  Target: SCNA; (+) strand; PAM type: YTN; PAM sequence: TTT
ttaaaaaataaaaatattat

SEQ ID NO: 78675 - DNA, 20 bp, Artificial Sequence
  Description of Artificial Sequence: Synthetic oligonucleotide
  Target: SCNA; (+) strand; PAM type: YTN; PAM sequence: TTT
taaaaaataaaaatattatg

SEQ ID NO: 78676 - DNA, 20 bp, Artificial Sequence
  Description of Artificial Sequence: Synthetic oligonucleotide
  Target: SCNA; (+) strand; PAM type: YTN; PAM sequence: TTT
aaaaaataaaaatattatgc

SEQ ID NO: 78677 - DNA, 20 bp, Artificial Sequence
  Description of Artificial Sequence: Synthetic oligonucleotide
  Target: SCNA; (+) strand; PAM type: YTN; PAM sequence: TTA
aaaaataaaaatattatgct

SEQ ID NO: 78678 - DNA, 20 bp, Artificial Sequence
  Description of Artificial Sequence: Synthetic oligonucleotide
  Target: SCNA; (+) strand; PAM type: YTN; PAM sequence: TTA
tgctgcacaaactgctttgt

SEQ ID NO: 78679 - DNA, 20 bp, Artificial Sequence
  Description of Artificial Sequence: Synthetic oligonucleotide
  Target: SCNA; (+) strand; PAM type: YTN; PAM sequence: CTG
cacaaactgctttgtaattt

SEQ ID NO: 78680 - DNA, 20 bp, Artificial Sequence
  Description of Artificial Sequence: Synthetic oligonucleotide
  Target: SCNA; (+) strand; PAM type: YTN; PAM sequence: CTG
ctttgtaatttgttcttttc

SEQ ID NO: 78681 - DNA, 20 bp, Artificial Sequence
  Description of Artificial Sequence: Synthetic oligonucleotide
  Target: SCNA; (+) strand; PAM type: YTN; PAM sequence: CTT
tgtaatttgttcttttcaca

SEQ ID NO: 78682 - DNA, 20 bp, Artificial Sequence
  Description of Artificial Sequence: Synthetic oligonucleotide
  Target: SCNA; (+) strand; PAM type: YTN; PAM sequence: TTT
gtaatttgttcttttcacat

SEQ ID NO: 78683 - DNA, 20 bp, Artificial Sequence
  Description of Artificial Sequence: Synthetic oligonucleotide
  Target: SCNA; (+) strand; PAM type: YTN; PAM sequence: TTG
taatttgttcttttcacata

SEQ ID NO: 78684 - DNA, 20 bp, Artificial Sequence
  Description of Artificial Sequence: Synthetic oligonucleotide
  Target: SCNA; (+) strand; PAM type: YTN; PAM sequence: TTT
gttcttttcacatactgcaa

SEQ ID NO: 78685 - DNA, 20 bp, Artificial Sequence
  Description of Artificial Sequence: Synthetic oligonucleotide
  Target: SCNA; (+) strand; PAM type: YTN; PAM sequence: TTG
ttcttttcacatactgcaac

SEQ ID NO: 78686 - DNA, 20 bp, Artificial Sequence
  Description of Artificial Sequence: Synthetic oligonucleotide
  Target: SCNA; (+) strand; PAM type: YTN; PAM sequence: TTC
ttttcacatactgcaacaat

SEQ ID NO: 78687 - DNA, 20 bp, Artificial Sequence
  Description of Artificial Sequence: Synthetic oligonucleotide
  Target: SCNA; (+) strand; PAM type: YTN; PAM sequence: CTT
ttcacatactgcaacaatag

SEQ ID NO: 78688 - DNA, 20 bp, Artificial Sequence
  Description of Artificial Sequence: Synthetic oligonucleotide
  Target: SCNA; (+) strand; PAM type: YTN; PAM sequence: TTT
tcacatactgcaacaatagc

SEQ ID NO: 78689 - DNA, 20 bp, Artificial Sequence
  Description of Artificial Sequence: Synthetic oligonucleotide
  Target: SCNA; (+) strand; PAM type: YTN; PAM sequence: TTT
cacatactgcaacaatagca

SEQ ID NO: 78690 - DNA, 20 bp, Artificial Sequence
  Description of Artificial Sequence: Synthetic oligonucleotide
  Target: SCNA; (+) strand; PAM type: YTN; PAM sequence: TTC
acatactgcaacaatagcat

SEQ ID NO: 78691 - DNA, 20 bp, Artificial Sequence
  Description of Artificial Sequence: Synthetic oligonucleotide
  Target: SCNA; (+) strand; PAM type: YTN; PAM sequence: CTG
caacaatagcatccttccac

SEQ ID NO: 78692 - DNA, 20 bp, Artificial Sequence
  Description of Artificial Sequence: Synthetic oligonucleotide
  Target: SCNA; (+) strand; PAM type: YTN; PAM sequence: CTT
ccacaccattaataattatt

SEQ ID NO: 78693 - DNA, 20 bp, Artificial Sequence
  Description of Artificial Sequence: Synthetic oligonucleotide
  Target: SCNA; (+) strand; PAM type: YTN; PAM sequence: TTC
cacaccattaataattattc

SEQ ID NO: 78694 - DNA, 20 bp, Artificial Sequence
  Description of Artificial Sequence: Synthetic oligonucleotide
  Target: SCNA; (+) strand; PAM type: YTN; PAM sequence: TTA
ataattattctacaacattt

SEQ ID NO: 78695 - DNA, 20 bp, Artificial Sequence
  Description of Artificial Sequence: Synthetic oligonucleotide
  Target: SCNA; (+) strand; PAM type: YTN; PAM sequence: TTA
ttctacaacattttaatggc

SEQ ID NO: 78696 - DNA, 20 bp, Artificial Sequence
  Description of Artificial Sequence: Synthetic oligonucleotide
  Target: SCNA; (+) strand; PAM type: YTN; PAM sequence: TTC
tacaacattttaatggctgt

SEQ ID NO: 78697 - DNA, 20 bp, Artificial Sequence
  Description of Artificial Sequence: Synthetic oligonucleotide
  Target: SCNA; (+) strand; PAM type: YTN; PAM sequence: CTA
caacattttaatggctgttc

SEQ ID NO: 78698 - DNA, 20 bp, Artificial Sequence
  Description of Artificial Sequence: Synthetic oligonucleotide
  Target: SCNA; (+) strand; PAM type: YTN; PAM sequence: TTT
taatggctgttcagcaaacc

SEQ ID NO: 78699 - DNA, 20 bp, Artificial Sequence
  Description of Artificial Sequence: Synthetic oligonucleotide
  Target: SCNA; (+) strand; PAM type: YTN; PAM sequence: TTT
aatggctgttcagcaaacca

SEQ ID NO: 78700 - DNA, 20 bp, Artificial Sequence
  Description of Artificial Sequence: Synthetic oligonucleotide
  Target: SCNA; (+) strand; PAM type: YTN; PAM sequence: TTA
atggctgttcagcaaaccac

SEQ ID NO: 78701 - DNA, 20 bp, Artificial Sequence
  Description of Artificial Sequence: Synthetic oligonucleotide
  Target: SCNA; (+) strand; PAM type: YTN; PAM sequence: CTG
ttcagcaaaccactgcatgg

SEQ ID NO: 78702 - DNA, 20 bp, Artificial Sequence
  Description of Artificial Sequence: Synthetic oligonucleotide
  Target: SCNA; (+) strand; PAM type: YTN; PAM sequence: TTC
agcaaaccactgcatggatc

SEQ ID NO: 78703 - DNA, 20 bp, Artificial Sequence
  Description of Artificial Sequence: Synthetic oligonucleotide
  Target: SCNA; (+) strand; PAM type: YTN; PAM sequence: CTG
catggatcaaccataatgca

SEQ ID NO: 78704 - DNA, 20 bp, Artificial Sequence
  Description of Artificial Sequence: Synthetic oligonucleotide
  Target: SCNA; (+) strand; PAM type: YTN; PAM sequence: TTT
aatgaggtccctatgatcaa

SEQ ID NO: 78705 - DNA, 20 bp, Artificial Sequence
  Description of Artificial Sequence: Synthetic oligonucleotide
  Target: SCNA; (+) strand; PAM type: YTN; PAM sequence: TTA
atgaggtccctatgatcaaa

SEQ ID NO: 78706 - DNA, 20 bp, Artificial Sequence
  Description of Artificial Sequence: Synthetic oligonucleotide
  Target: SCNA; (+) strand; PAM type: YTN; PAM sequence: CTA
tgatcaaacttctagcacta

SEQ ID NO: 78707 - DNA, 20 bp, Artificial Sequence
  Description of Artificial Sequence: Synthetic oligonucleotide
  Target: SCNA; (+) strand; PAM type: YTN; PAM sequence: CTT
ctagcactatttttttcaat

SEQ ID NO: 78708 - DNA, 20 bp, Artificial Sequence
  Description of Artificial Sequence: Synthetic oligonucleotide
  Target: SCNA; (+) strand; PAM type: YTN; PAM sequence: TTC
tagcactatttttttcaatt

SEQ ID NO: 78709 - DNA, 20 bp, Artificial Sequence
  Description of Artificial Sequence: Synthetic oligonucleotide
  Target: SCNA; (+) strand; PAM type: YTN; PAM sequence: CTA
gcactatttttttcaatttt

SEQ ID NO: 78710 - DNA, 20 bp, Artificial Sequence
  Description of Artificial Sequence: Synthetic oligonucleotide
  Target: SCNA; (+) strand; PAM type: YTN; PAM sequence: CTA
tttttttcaattttgtttta

SEQ ID NO: 78711 - DNA, 20 bp, Artificial Sequence
  Description of Artificial Sequence: Synthetic oligonucleotide
  Target: SCNA; (+) strand; PAM type: YTN; PAM sequence: TTT
ttttcaattttgttttataa

SEQ ID NO: 78712 - DNA, 20 bp, Artificial Sequence
  Description of Artificial Sequence: Synthetic oligonucleotide
  Target: SCNA; (+) strand; PAM type: YTN; PAM sequence: TTT
tttcaattttgttttataat

SEQ ID NO: 78713 - DNA, 20 bp, Artificial Sequence
  Description of Artificial Sequence: Synthetic oligonucleotide
  Target: SCNA; (+) strand; PAM type: YTN; PAM sequence: TTT
ttcaattttgttttataatc

SEQ ID NO: 78714 - DNA, 20 bp, Artificial Sequence
  Description of Artificial Sequence: Synthetic oligonucleotide
  Target: SCNA; (+) strand; PAM type: YTN; PAM sequence: TTT
tcaattttgttttataatca

SEQ ID NO: 78715 - DNA, 20 bp, Artificial Sequence
  Description of Artificial Sequence: Synthetic oligonucleotide
  Target: SCNA; (+) strand; PAM type: YTN; PAM sequence: TTT
caattttgttttataatcaa

SEQ ID NO: 78716 - DNA, 20 bp, Artificial Sequence
  Description of Artificial Sequence: Synthetic oligonucleotide
  Target: SCNA; (+) strand; PAM type: YTN; PAM sequence: TTC
aattttgttttataatcaat

SEQ ID NO: 78717 - DNA, 20 bp, Artificial Sequence
  Description of Artificial Sequence: Synthetic oligonucleotide
  Target: SCNA; (+) strand; PAM type: YTN; PAM sequence: TTT
tgttttataatcaattctgt

SEQ ID NO: 78718 - DNA, 20 bp, Artificial Sequence
  Description of Artificial Sequence: Synthetic oligonucleotide
  Target: SCNA; (+) strand; PAM type: YTN; PAM sequence: TTT
gttttataatcaattctgtg

SEQ ID NO: 78719 - DNA, 20 bp, Artificial Sequence
  Description of Artificial Sequence: Synthetic oligonucleotide
  Target: SCNA; (+) strand; PAM type: YTN; PAM sequence: TTG
ttttataatcaattctgtga

SEQ ID NO: 78720 - DNA, 20 bp, Artificial Sequence
  Description of Artificial Sequence: Synthetic oligonucleotide
  Target: SCNA; (+) strand; PAM type: YTN; PAM sequence: TTT
tataatcaattctgtgataa

SEQ ID NO: 78721 - DNA, 20 bp, Artificial Sequence
  Description of Artificial Sequence: Synthetic oligonucleotide
  Target: SCNA; (+) strand; PAM type: YTN; PAM sequence: TTT
ataatcaattctgtgataaa

SEQ ID NO: 78722 - DNA, 20 bp, Artificial Sequence
  Description of Artificial Sequence: Synthetic oligonucleotide
  Target: SCNA; (+) strand; PAM type: YTN; PAM sequence: TTA
taatcaattctgtgataaac

SEQ ID NO: 78723 - DNA, 20 bp, Artificial Sequence
  Description of Artificial Sequence: Synthetic oligonucleotide
  Target: SCNA; (+) strand; PAM type: YTN; PAM sequence: TTC
tgtgataaacatcttcatat

SEQ ID NO: 78724 - DNA, 20 bp, Artificial Sequence
  Description of Artificial Sequence: Synthetic oligonucleotide
  Target: SCNA; (+) strand; PAM type: YTN; PAM sequence: CTG
tgataaacatcttcatattt

SEQ ID NO: 78725 - DNA, 20 bp, Artificial Sequence
  Description of Artificial Sequence: Synthetic oligonucleotide
  Target: SCNA; (+) strand; PAM type: YTN; PAM sequence: CTT
catatttaaacttatgatca

SEQ ID NO: 78726 - DNA, 20 bp, Artificial Sequence
  Description of Artificial Sequence: Synthetic oligonucleotide
  Target: SCNA; (+) strand; PAM type: YTN; PAM sequence: TTC
atatttaaacttatgatcat

SEQ ID NO: 78727 - DNA, 20 bp, Artificial Sequence
  Description of Artificial Sequence: Synthetic oligonucleotide
  Target: SCNA; (+) strand; PAM type: YTN; PAM sequence: TTT
aaacttatgatcatatttaa

SEQ ID NO: 78728 - DNA, 20 bp, Artificial Sequence
  Description of Artificial Sequence: Synthetic oligonucleotide
  Target: SCNA; (+) strand; PAM type: YTN; PAM sequence: TTA
aacttatgatcatatttaaa

SEQ ID NO: 78729 - DNA, 20 bp, Artificial Sequence
  Description of Artificial Sequence: Synthetic oligonucleotide
  Target: SCNA; (+) strand; PAM type: YTN; PAM sequence: CTT
atgatcatatttaaattctt

SEQ ID NO: 78730 - DNA, 20 bp, Artificial Sequence
  Description of Artificial Sequence: Synthetic oligonucleotide
  Target: SCNA; (+) strand; PAM type: YTN; PAM sequence: TTA
tgatcatatttaaattctta

SEQ ID NO: 78731 - DNA, 20 bp, Artificial Sequence
  Description of Artificial Sequence: Synthetic oligonucleotide
  Target: SCNA; (+) strand; PAM type: YTN; PAM sequence: TTT
aaattcttagacatgcgact

SEQ ID NO: 78732 - DNA, 20 bp, Artificial Sequence
  Description of Artificial Sequence: Synthetic oligonucleotide
  Target: SCNA; (+) strand; PAM type: YTN; PAM sequence: TTA
aattcttagacatgcgactg

SEQ ID NO: 78733 - DNA, 20 bp, Artificial Sequence
  Description of Artificial Sequence: Synthetic oligonucleotide
  Target: SCNA; (+) strand; PAM type: YTN; PAM sequence: TTC
ttagacatgcgactggtcag

SEQ ID NO: 78734 - DNA, 20 bp, Artificial Sequence
  Description of Artificial Sequence: Synthetic oligonucleotide
  Target: SCNA; (+) strand; PAM type: YTN; PAM sequence: CTT
agacatgcgactggtcagag

SEQ ID NO: 78735 - DNA, 20 bp, Artificial Sequence
  Description of Artificial Sequence: Synthetic oligonucleotide
  Target: SCNA; (+) strand; PAM type: YTN; PAM sequence: TTA
gacatgcgactggtcagagc

SEQ ID NO: 78736 - DNA, 20 bp, Artificial Sequence
  Description of Artificial Sequence: Synthetic oligonucleotide
  Target: SCNA; (+) strand; PAM type: YTN; PAM sequence: CTG
gtcagagcatgcataatttc

SEQ ID NO: 78737 - DNA, 20 bp, Artificial Sequence
  Description of Artificial Sequence: Synthetic oligonucleotide
  Target: SCNA; (+) strand; PAM type: YTN; PAM sequence: TTT
caatgcttttgatagacttc

SEQ ID NO: 78738 - DNA, 20 bp, Artificial Sequence
  Description of Artificial Sequence: Synthetic oligonucleotide
  Target: SCNA; (+) strand; PAM type: YTN; PAM sequence: TTC
aatgcttttgatagacttcc

SEQ ID NO: 78739 - DNA, 20 bp, Artificial Sequence
  Description of Artificial Sequence: Synthetic oligonucleotide
  Target: SCNA; (+) strand; PAM type: YTN; PAM sequence: CTT
ttgatagacttccaacatgt

SEQ ID NO: 78740 - DNA, 20 bp, Artificial Sequence
  Description of Artificial Sequence: Synthetic oligonucleotide
  Target: SCNA; (+) strand; PAM type: YTN; PAM sequence: TTT
tgatagacttccaacatgtc

SEQ ID NO: 78741 - DNA, 20 bp, Artificial Sequence
  Description of Artificial Sequence: Synthetic oligonucleotide
  Target: SCNA; (+) strand; PAM type: YTN; PAM sequence: TTT
gatagacttccaacatgtcc

SEQ ID NO: 78742 - DNA, 20 bp, Artificial Sequence
  Description of Artificial Sequence: Synthetic oligonucleotide
  Target: SCNA; (+) strand; PAM type: YTN; PAM sequence: TTG
atagacttccaacatgtcct

SEQ ID NO: 78743 - DNA, 20 bp, Artificial Sequence
  Description of Artificial Sequence: Synthetic oligonucleotide
  Target: SCNA; (+) strand; PAM type: YTN; PAM sequence: CTT
ccaacatgtcctcaaaaatg

SEQ ID NO: 78744 - DNA, 20 bp, Artificial Sequence
  Description of Artificial Sequence: Synthetic oligonucleotide
  Target: SCNA; (+) strand; PAM type: YTN; PAM sequence: TTC
caacatgtcctcaaaaatga

SEQ ID NO: 78745 - DNA, 20 bp, Artificial Sequence
  Description of Artificial Sequence: Synthetic oligonucleotide
  Target: SCNA; (+) strand; PAM type: YTN; PAM sequence: CTC
aaaaatgacttttattagtt

SEQ ID NO: 78746 - DNA, 20 bp, Artificial Sequence
  Description of Artificial Sequence: Synthetic oligonucleotide
  Target: SCNA; (+) strand; PAM type: YTN; PAM sequence: CTT
ttattagtttattctctaac

SEQ ID NO: 78747 - DNA, 20 bp, Artificial Sequence
  Description of Artificial Sequence: Synthetic oligonucleotide
  Target: SCNA; (+) strand; PAM type: YTN; PAM sequence: TTT
tattagtttattctctaacc

SEQ ID NO: 78748 - DNA, 20 bp, Artificial Sequence
  Description of Artificial Sequence: Synthetic oligonucleotide
  Target: SCNA; (+) strand; PAM type: YTN; PAM sequence: TTT
attagtttattctctaacca

SEQ ID NO: 78749 - DNA, 20 bp, Artificial Sequence
  Description of Artificial Sequence: Synthetic oligonucleotide
  Target: SCNA; (+) strand; PAM type: YTN; PAM sequence: TTA
ttagtttattctctaaccat

SEQ ID NO: 78750 - DNA, 20 bp, Artificial Sequence
  Description of Artificial Sequence: Synthetic oligonucleotide
  Target: SCNA; (+) strand; PAM type: YTN; PAM sequence: TTA
gtttattctctaaccatatt

SEQ ID NO: 78751 - DNA, 20 bp, Artificial Sequence
  Description of Artificial Sequence: Synthetic oligonucleotide
  Target: SCNA; (+) strand; PAM type: YTN; PAM sequence: TTT
attctctaaccatattgttc

SEQ ID NO: 78752 - DNA, 20 bp, Artificial Sequence
  Description of Artificial Sequence: Synthetic oligonucleotide
  Target: SCNA; (+) strand; PAM type: YTN; PAM sequence: TTA
ttctctaaccatattgttct

SEQ ID NO: 78753 - DNA, 20 bp, Artificial Sequence
  Description of Artificial Sequence: Synthetic oligonucleotide
  Target: SCNA; (+) strand; PAM type: YTN; PAM sequence: TTC
tctaaccatattgttctgat

SEQ ID NO: 78754 - DNA, 20 bp, Artificial Sequence
  Description of Artificial Sequence: Synthetic oligonucleotide
  Target: SCNA; (+) strand; PAM type: YTN; PAM sequence: CTC
taaccatattgttctgattg

SEQ ID NO: 78755 - DNA, 20 bp, Artificial Sequence
  Description of Artificial Sequence: Synthetic oligonucleotide
  Target: SCNA; (+) strand; PAM type: YTN; PAM sequence: CTA
accatattgttctgattgat

SEQ ID NO: 78756 - DNA, 20 bp, Artificial Sequence
  Description of Artificial Sequence: Synthetic oligonucleotide
  Target: SCNA; (+) strand; PAM type: YTN; PAM sequence: TTG
ttctgattgatggacatctc

SEQ ID NO: 78757 - DNA, 20 bp, Artificial Sequence
  Description of Artificial Sequence: Synthetic oligonucleotide
  Target: SCNA; (+) strand; PAM type: YTN; PAM sequence: TTC
tgattgatggacatctctaa

SEQ ID NO: 78758 - DNA, 20 bp, Artificial Sequence
  Description of Artificial Sequence: Synthetic oligonucleotide
  Target: SCNA; (+) strand; PAM type: YTN; PAM sequence: CTG
attgatggacatctctaaca

SEQ ID NO: 78759 - DNA, 20 bp, Artificial Sequence
  Description of Artificial Sequence: Synthetic oligonucleotide
  Target: SCNA; (+) strand; PAM type: YTN; PAM sequence: TTG
atggacatctctaacataaa

SEQ ID NO: 78760 - DNA, 20 bp, Artificial Sequence
  Description of Artificial Sequence: Synthetic oligonucleotide
  Target: SCNA; (+) strand; PAM type: YTN; PAM sequence: CTC
taacataaagttgctgaaaa

SEQ ID NO: 78761 - DNA, 20 bp, Artificial Sequence
  Description of Artificial Sequence: Synthetic oligonucleotide
  Target: SCNA; (+) strand; PAM type: YTN; PAM sequence: CTA
acataaagttgctgaaaata

SEQ ID NO: 78762 - DNA, 20 bp, Artificial Sequence
  Description of Artificial Sequence: Synthetic oligonucleotide
  Target: SCNA; (+) strand; PAM type: YTN; PAM sequence: TTG
ctgaaaatatgaaacatcag

SEQ ID NO: 78763 - DNA, 20 bp, Artificial Sequence
  Description of Artificial Sequence: Synthetic oligonucleotide
  Target: SCNA; (+) strand; PAM type: YTN; PAM sequence: CTG
aaaatatgaaacatcagctg

SEQ ID NO: 78764 - DNA, 20 bp, Artificial Sequence
  Description of Artificial Sequence: Synthetic oligonucleotide
  Target: SCNA; (+) strand; PAM type: YTN; PAM sequence: CTG
aggcactgtgaccctgggaa

SEQ ID NO: 78765 - DNA, 20 bp, Artificial Sequence
  Description of Artificial Sequence: Synthetic oligonucleotide
  Target: SCNA; (+) strand; PAM type: YTN; PAM sequence: CTG
tgaccctgggaactggctgg

SEQ ID NO: 78766 - DNA, 20 bp, Artificial Sequence
  Description of Artificial Sequence: Synthetic oligonucleotide
  Target: SCNA; (+) strand; PAM type: YTN; PAM sequence: CTG
ggaactggctggtcccttcc

SEQ ID NO: 78767 - DNA, 20 bp, Artificial Sequence
  Description of Artificial Sequence: Synthetic oligonucleotide
  Target: SCNA; (+) strand; PAM type: YTN; PAM sequence: CTG
gctggtcccttcctagccca

SEQ ID NO: 78768 - DNA, 20 bp, Artificial Sequence
  Description of Artificial Sequence: Synthetic oligonucleotide
  Target: SCNA; (+) strand; PAM type: YTN; PAM sequence: CTG
gtcccttcctagcccacatc

SEQ ID NO: 78769 - DNA, 20 bp, Artificial Sequence
  Description of Artificial Sequence: Synthetic oligonucleotide
  Target: SCNA; (+) strand; PAM type: YTN; PAM sequence: CTT
cctagcccacatcttagtag

SEQ ID NO: 78770 - DNA, 20 bp, Artificial Sequence
  Description of Artificial Sequence: Synthetic oligonucleotide
  Target: SCNA; (+) strand; PAM type: YTN; PAM sequence: TTC
ctagcccacatcttagtaga

SEQ ID NO: 78771 - DNA, 20 bp, Artificial Sequence
  Description of Artificial Sequence: Synthetic oligonucleotide
  Target: SCNA; (+) strand; PAM type: YTN; PAM sequence: CTA
gcccacatcttagtagaaga

SEQ ID NO: 78772 - DNA, 20 bp, Artificial Sequence
  Description of Artificial Sequence: Synthetic oligonucleotide
  Target: SCNA; (+) strand; PAM type: YTN; PAM sequence: CTT
agtagaagatgcaagggtta

SEQ ID NO: 78773 - DNA, 20 bp, Artificial Sequence
  Description of Artificial Sequence: Synthetic oligonucleotide
  Target: SCNA; (+) strand; PAM type: YTN; PAM sequence: TTA
gtagaagatgcaagggttat

SEQ ID NO: 78774 - DNA, 20 bp, Artificial Sequence
  Description of Artificial Sequence: Synthetic oligonucleotide
  Target: SCNA; (+) strand; PAM type: YTN; PAM sequence: TTA
ttgtggaatacgtccgcggg

SEQ ID NO: 78775 - DNA, 20 bp, Artificial Sequence
  Description of Artificial Sequence: Synthetic oligonucleotide
  Target: SCNA; (+) strand; PAM type: YTN; PAM sequence: TTG
tggaatacgtccgcgggtta

SEQ ID NO: 78776 - DNA, 20 bp, Artificial Sequence
  Description of Artificial Sequence: Synthetic oligonucleotide
  Target: SCNA; (+) strand; PAM type: YTN; PAM sequence: TTA
aaaaccatgtatcaattcta

SEQ ID NO: 78777 - DNA, 20 bp, Artificial Sequence
  Description of Artificial Sequence: Synthetic oligonucleotide
  Target: SCNA; (+) strand; PAM type: YTN; PAM sequence: TTC
taaattccaagtgccagacc

SEQ ID NO: 78778 - DNA, 20 bp, Artificial Sequence
  Description of Artificial Sequence: Synthetic oligonucleotide
  Target: SCNA; (+) strand; PAM type: YTN; PAM sequence: CTA
aattccaagtgccagaccct

SEQ ID NO: 78779 - DNA, 20 bp, Artificial Sequence
  Description of Artificial Sequence: Synthetic oligonucleotide
  Target: SCNA; (+) strand; PAM type: YTN; PAM sequence: TTC
caagtgccagaccctttcat

SEQ ID NO: 78780 - DNA, 20 bp, Artificial Sequence
  Description of Artificial Sequence: Synthetic oligonucleotide
  Target: SCNA; (+) strand; PAM type: YTN; PAM sequence: CTT
tcattacctttcattagcga

SEQ ID NO: 78781 - DNA, 20 bp, Artificial Sequence
  Description of Artificial Sequence: Synthetic oligonucleotide
  Target: SCNA; (+) strand; PAM type: YTN; PAM sequence: TTT
cattacctttcattagcgaa

SEQ ID NO: 78782 - DNA, 20 bp, Artificial Sequence
  Description of Artificial Sequence: Synthetic oligonucleotide
  Target: SCNA; (+) strand; PAM type: YTN; PAM sequence: TTC
attacctttcattagcgaag

SEQ ID NO: 78783 - DNA, 20 bp, Artificial Sequence
  Description of Artificial Sequence: Synthetic oligonucleotide
  Target: SCNA; (+) strand; PAM type: YTN; PAM sequence: TTA
cctttcattagcgaagtata

SEQ ID NO: 78784 - DNA, 20 bp, Artificial Sequence
  Description of Artificial Sequence: Synthetic oligonucleotide
  Target: SCNA; (+) strand; PAM type: YTN; PAM sequence: CTT
tcattagcgaagtataaaaa

SEQ ID NO: 78785 - DNA, 20 bp, Artificial Sequence
  Description of Artificial Sequence: Synthetic oligonucleotide
  Target: SCNA; (+) strand; PAM type: YTN; PAM sequence: TTT
cattagcgaagtataaaaag

SEQ ID NO: 78786 - DNA, 20 bp, Artificial Sequence
  Description of Artificial Sequence: Synthetic oligonucleotide
  Target: SCNA; (+) strand; PAM type: YTN; PAM sequence: TTC
attagcgaagtataaaaaga

SEQ ID NO: 78787 - DNA, 20 bp, Artificial Sequence
  Description of Artificial Sequence: Synthetic oligonucleotide
  Target: SCNA; (+) strand; PAM type: YTN; PAM sequence: TTA
gcgaagtataaaaagaaaga

SEQ ID NO: 78788 - DNA, 20 bp, Artificial Sequence
  Description of Artificial Sequence: Synthetic oligonucleotide
  Target: SCNA; (+) strand; PAM type: YTN; PAM sequence: TTT
tcaaggaaagtaataagaag

SEQ ID NO: 78789 - DNA, 20 bp, Artificial Sequence
  Description of Artificial Sequence: Synthetic oligonucleotide
  Target: SCNA; (+) strand; PAM type: YTN; PAM sequence: TTT
caaggaaagtaataagaagg

SEQ ID NO: 78790 - DNA, 20 bp, Artificial Sequence
  Description of Artificial Sequence: Synthetic oligonucleotide
  Target: SCNA; (+) strand; PAM type: YTN; PAM sequence: TTC
aaggaaagtaataagaaggg

SEQ ID NO: 78791 - DNA, 20 bp, Artificial Sequence
  Description of Artificial Sequence: Synthetic oligonucleotide
  Target: SCNA; (+) strand; PAM type: YTN; PAM sequence: TTA
gtggaacattagagtttgtc

SEQ ID NO: 78792 - DNA, 20 bp, Artificial Sequence
  Description of Artificial Sequence: Synthetic oligonucleotide
  Target: SCNA; (+) strand; PAM type: YTN; PAM sequence: TTA
gagtttgtctctggtccttc

SEQ ID NO: 78793 - DNA, 20 bp, Artificial Sequence
  Description of Artificial Sequence: Synthetic oligonucleotide
  Target: SCNA; (+) strand; PAM type: YTN; PAM sequence: TTT
gtctctggtccttcctctga

SEQ ID NO: 78794 - DNA, 20 bp, Artificial Sequence
  Description of Artificial Sequence: Synthetic oligonucleotide
  Target: SCNA; (+) strand; PAM type: YTN; PAM sequence: TTG
tctctggtccttcctctgag

SEQ ID NO: 78795 - DNA, 20 bp, Artificial Sequence
  Description of Artificial Sequence: Synthetic oligonucleotide
  Target: SCNA; (+) strand; PAM type: YTN; PAM sequence: CTC
tggtccttcctctgagtggg

SEQ ID NO: 78796 - DNA, 20 bp, Artificial Sequence
  Description of Artificial Sequence: Synthetic oligonucleotide
  Target: SCNA; (+) strand; PAM type: YTN; PAM sequence: CTG
gtccttcctctgagtgggga

SEQ ID NO: 78797 - DNA, 20 bp, Artificial Sequence
  Description of Artificial Sequence: Synthetic oligonucleotide
  Target: SCNA; (+) strand; PAM type: YTN; PAM sequence: CTT
cctctgagtggggactcatg

SEQ ID NO: 78798 - DNA, 20 bp, Artificial Sequence
  Description of Artificial Sequence: Synthetic oligonucleotide
  Target: SCNA; (+) strand; PAM type: YTN; PAM sequence: TTC
ctctgagtggggactcatga

SEQ ID NO: 78799 - DNA, 20 bp, Artificial Sequence
  Description of Artificial Sequence: Synthetic oligonucleotide
  Target: SCNA; (+) strand; PAM type: YTN; PAM sequence: CTC
tgagtggggactcatgaggc

SEQ ID NO: 78800 - DNA, 20 bp, Artificial Sequence
  Description of Artificial Sequence: Synthetic oligonucleotide
  Target: SCNA; (+) strand; PAM type: YTN; PAM sequence: CTG
agtggggactcatgaggctt

SEQ ID NO: 78801 - DNA, 20 bp, Artificial Sequence
  Description of Artificial Sequence: Synthetic oligonucleotide
  Target: SCNA; (+) strand; PAM type: YTN; PAM sequence: CTC
atgaggcttggtgttgtctg

SEQ ID NO: 78802 - DNA, 20 bp, Artificial Sequence
  Description of Artificial Sequence: Synthetic oligonucleotide
  Target: SCNA; (+) strand; PAM type: YTN; PAM sequence: CTT
ggtgttgtctgaaagcagga

SEQ ID NO: 78803 - DNA, 20 bp, Artificial Sequence
  Description of Artificial Sequence: Synthetic oligonucleotide
  Target: SCNA; (+) strand; PAM type: YTN; PAM sequence: TTG
gtgttgtctgaaagcaggaa

SEQ ID NO: 78804 - DNA, 20 bp, Artificial Sequence
  Description of Artificial Sequence: Synthetic oligonucleotide
  Target: SCNA; (+) strand; PAM type: YTN; PAM sequence: TTG
tctgaaagcaggaaggactt

SEQ ID NO: 78805 - DNA, 20 bp, Artificial Sequence
  Description of Artificial Sequence: Synthetic oligonucleotide
  Target: SCNA; (+) strand; PAM type: YTN; PAM sequence: CTG
aaagcaggaaggacttgggt

SEQ ID NO: 78806 - DNA, 20 bp, Artificial Sequence
  Description of Artificial Sequence: Synthetic oligonucleotide
  Target: SCNA; (+) strand; PAM type: YTN; PAM sequence: CTT
gggtcttactccctggtagg

SEQ ID NO: 78807 - DNA, 20 bp, Artificial Sequence
  Description of Artificial Sequence: Synthetic oligonucleotide
  Target: SCNA; (+) strand; PAM type: YTN; PAM sequence: TTG
ggtcttactccctggtagga

SEQ ID NO: 78808 - DNA, 20 bp, Artificial Sequence
  Description of Artificial Sequence: Synthetic oligonucleotide
  Target: SCNA; (+) strand; PAM type: YTN; PAM sequence: CTT
actccctggtaggatgcagc

SEQ ID NO: 78809 - DNA, 20 bp, Artificial Sequence
  Description of Artificial Sequence: Synthetic oligonucleotide
  Target: SCNA; (+) strand; PAM type: YTN; PAM sequence: TTA
ctccctggtaggatgcagcc

SEQ ID NO: 78810 - DNA, 20 bp, Artificial Sequence
  Description of Artificial Sequence: Synthetic oligonucleotide
  Target: SCNA; (+) strand; PAM type: YTN; PAM sequence: CTC
cctggtaggatgcagcctga

SEQ ID NO: 78811 - DNA, 20 bp, Artificial Sequence
  Description of Artificial Sequence: Synthetic oligonucleotide
  Target: SCNA; (+) strand; PAM type: YTN; PAM sequence: CTG
gtaggatgcagcctgaggag

SEQ ID NO: 78812 - DNA, 20 bp, Artificial Sequence
  Description of Artificial Sequence: Synthetic oligonucleotide
  Target: SCNA; (+) strand; PAM type: YTN; PAM sequence: CTG
aggagcaaggccggcagtca

SEQ ID NO: 78813 - DNA, 20 bp, Artificial Sequence
  Description of Artificial Sequence: Synthetic oligonucleotide
  Target: SCNA; (+) strand; PAM type: YTN; PAM sequence: TTC
atacagacgtgggggctgac

SEQ ID NO: 78814 - DNA, 20 bp, Artificial Sequence
  Description of Artificial Sequence: Synthetic oligonucleotide
  Target: SCNA; (+) strand; PAM type: YTN; PAM sequence: CTG
acatatcaagttggagaatg

SEQ ID NO: 78815 - DNA, 20 bp, Artificial Sequence
  Description of Artificial Sequence: Synthetic oligonucleotide
  Target: SCNA; (+) strand; PAM type: YTN; PAM sequence: TTG
gagaatgtatgctcacttcc

SEQ ID NO: 78816 - DNA, 20 bp, Artificial Sequence
  Description of Artificial Sequence: Synthetic oligonucleotide
  Target: SCNA; (+) strand; PAM type: YTN; PAM sequence: CTC
acttcctgtcacccccatac

SEQ ID NO: 78817 - DNA, 20 bp, Artificial Sequence
  Description of Artificial Sequence: Synthetic oligonucleotide
  Target: SCNA; (+) strand; PAM type: YTN; PAM sequence: CTT
cctgtcacccccatacaccc

SEQ ID NO: 78818 - DNA, 20 bp, Artificial Sequence
  Description of Artificial Sequence: Synthetic oligonucleotide
  Target: SCNA; (+) strand; PAM type: YTN; PAM sequence: TTC
ctgtcacccccatacaccct

SEQ ID NO: 78819 - DNA, 20 bp, Artificial Sequence
  Description of Artificial Sequence: Synthetic oligonucleotide
  Target: SCNA; (+) strand; PAM type: YTN; PAM sequence: CTG
tcacccccatacaccctgat

SEQ ID NO: 78820 - DNA, 20 bp, Artificial Sequence
  Description of Artificial Sequence: Synthetic oligonucleotide
  Target: SCNA; (+) strand; PAM type: YTN; PAM sequence: CTG
attcccaagagttgaggcag

SEQ ID NO: 78821 - DNA, 20 bp, Artificial Sequence
  Description of Artificial Sequence: Synthetic oligonucleotide
  Target: SCNA; (+) strand; PAM type: YTN; PAM sequence: TTC
ccaagagttgaggcagttgt

SEQ ID NO: 78822 - DNA, 20 bp, Artificial Sequence
  Description of Artificial Sequence: Synthetic oligonucleotide
  Target: SCNA; (+) strand; PAM type: YTN; PAM sequence: TTG
aggcagttgtggtaggggtt

SEQ ID NO: 78823 - DNA, 20 bp, Artificial Sequence
  Description of Artificial Sequence: Synthetic oligonucleotide
  Target: SCNA; (+) strand; PAM type: YTN; PAM sequence: TTG
tggtaggggttcttaggttt

SEQ ID NO: 78824 - DNA, 20 bp, Artificial Sequence
  Description of Artificial Sequence: Synthetic oligonucleotide
  Target: SCNA; (+) strand; PAM type: YTN; PAM sequence: TTC
ttaggtttcccatgggctca

SEQ ID NO: 78825 - DNA, 20 bp, Artificial Sequence
  Description of Artificial Sequence: Synthetic oligonucleotide
  Target: SCNA; (+) strand; PAM type: YTN; PAM sequence: CTT
aggtttcccatgggctcaga

SEQ ID NO: 78826 - DNA, 20 bp, Artificial Sequence
  Description of Artificial Sequence: Synthetic oligonucleotide
  Target: SCNA; (+) strand; PAM type: YTN; PAM sequence: TTA
ggtttcccatgggctcagat

SEQ ID NO: 78827 - DNA, 20 bp, Artificial Sequence
  Description of Artificial Sequence: Synthetic oligonucleotide
  Target: SCNA; (+) strand; PAM type: YTN; PAM sequence: TTT
cccatgggctcagattaggc

SEQ ID NO: 78828 - DNA, 20 bp, Artificial Sequence
  Description of Artificial Sequence: Synthetic oligonucleotide
  Target: SCNA; (+) strand; PAM type: YTN; PAM sequence: TTC
ccatgggctcagattaggcc

SEQ ID NO: 78829 - DNA, 20 bp, Artificial Sequence
  Description of Artificial Sequence: Synthetic oligonucleotide
  Target: SCNA; (+) strand; PAM type: YTN; PAM sequence: CTC
agattaggcctcggacggaa

SEQ ID NO: 78830 - DNA, 20 bp, Artificial Sequence
  Description of Artificial Sequence: Synthetic oligonucleotide
  Target: SCNA; (+) strand; PAM type: YTN; PAM sequence: TTA
ggcctcggacggaagtgaag

SEQ ID NO: 78831 - DNA, 20 bp, Artificial Sequence
  Description of Artificial Sequence: Synthetic oligonucleotide
  Target: SCNA; (+) strand; PAM type: YTN; PAM sequence: CTC
ggacggaagtgaaggcagtg

SEQ ID NO: 78832 - DNA, 20 bp, Artificial Sequence
  Description of Artificial Sequence: Synthetic oligonucleotide
  Target: SCNA; (+) strand; PAM type: YTN; PAM sequence: CTG
gctgggtgaaatatggcgga

SEQ ID NO: 78833 - DNA, 20 bp, Artificial Sequence
  Description of Artificial Sequence: Synthetic oligonucleotide
  Target: SCNA; (+) strand; PAM type: YTN; PAM sequence: CTG
ggtgaaatatggcggacaga

SEQ ID NO: 78834 - DNA, 20 bp, Artificial Sequence
  Description of Artificial Sequence: Synthetic oligonucleotide
  Target: SCNA; (+) strand; PAM type: YTN; PAM sequence: TTA
tcccttttagacccctgaag

SEQ ID NO: 78835 - DNA, 20 bp, Artificial Sequence
  Description of Artificial Sequence: Synthetic oligonucleotide
  Target: SCNA; (+) strand; PAM type: YTN; PAM sequence: CTT
ttagacccctgaagtattag

SEQ ID NO: 78836 - DNA, 20 bp, Artificial Sequence
  Description of Artificial Sequence: Synthetic oligonucleotide
  Target: SCNA; (+) strand; PAM type: YTN; PAM sequence: TTT
tagacccctgaagtattaga

SEQ ID NO: 78837 - DNA, 20 bp, Artificial Sequence
  Description of Artificial Sequence: Synthetic oligonucleotide
  Target: SCNA; (+) strand; PAM type: YTN; PAM sequence: TTT
agacccctgaagtattagag

SEQ ID NO: 78838 - DNA, 20 bp, Artificial Sequence
  Description of Artificial Sequence: Synthetic oligonucleotide
  Target: SCNA; (+) strand; PAM type: YTN; PAM sequence: TTA
gacccctgaagtattagaga

SEQ ID NO: 78839 - DNA, 20 bp, Artificial Sequence
  Description of Artificial Sequence: Synthetic oligonucleotide
  Target: SCNA; (+) strand; PAM type: YTN; PAM sequence: CTG
aagtattagagaggatcagc

SEQ ID NO: 78840 - DNA, 20 bp, Artificial Sequence
  Description of Artificial Sequence: Synthetic oligonucleotide
  Target: SCNA; (+) strand; PAM type: YTN; PAM sequence: TTA
gagaggatcagccaggcacg

SEQ ID NO: 78841 - DNA, 20 bp, Artificial Sequence
  Description of Artificial Sequence: Synthetic oligonucleotide
  Target: SCNA; (+) strand; PAM type: YTN; PAM sequence: TTT
agaccatatgatgtatcata

SEQ ID NO: 78842 - DNA, 20 bp, Artificial Sequence
  Description of Artificial Sequence: Synthetic oligonucleotide
  Target: SCNA; (+) strand; PAM type: YTN; PAM sequence: TTA
gaccatatgatgtatcatat

SEQ ID NO: 78843 - DNA, 20 bp, Artificial Sequence
  Description of Artificial Sequence: Synthetic oligonucleotide
  Target: SCNA; (+) strand; PAM type: YTN; PAM sequence: TTG
tagattcaccccaaggcatt

SEQ ID NO: 78844 - DNA, 20 bp, Artificial Sequence
  Description of Artificial Sequence: Synthetic oligonucleotide
  Target: SCNA; (+) strand; PAM type: YTN; PAM sequence: TTC
accccaaggcatttgtggct

SEQ ID NO: 78845 - DNA, 20 bp, Artificial Sequence
  Description of Artificial Sequence: Synthetic oligonucleotide
  Target: SCNA; (+) strand; PAM type: YTN; PAM sequence: TTT
gtggctgtgcagtaaaagtg

SEQ ID NO: 78846 - DNA, 20 bp, Artificial Sequence
  Description of Artificial Sequence: Synthetic oligonucleotide
  Target: SCNA; (+) strand; PAM type: YTN; PAM sequence: TTG
tggctgtgcagtaaaagtgc

SEQ ID NO: 78847 - DNA, 20 bp, Artificial Sequence
  Description of Artificial Sequence: Synthetic oligonucleotide
  Target: SCNA; (+) strand; PAM type: YTN; PAM sequence: CTG
tgcagtaaaagtgcaggatg

SEQ ID NO: 78848 - DNA, 20 bp, Artificial Sequence
  Description of Artificial Sequence: Synthetic oligonucleotide
  Target: SCNA; (+) strand; PAM type: YTN; PAM sequence: CTC
tctgaagggtagggatattc

SEQ ID NO: 78849 - DNA, 20 bp, Artificial Sequence
  Description of Artificial Sequence: Synthetic oligonucleotide
  Target: SCNA; (+) strand; PAM type: YTN; PAM sequence: CTC
tgaagggtagggatattccc

SEQ ID NO: 78850 - DNA, 20 bp, Artificial Sequence
  Description of Artificial Sequence: Synthetic oligonucleotide
  Target: SCNA; (+) strand; PAM type: YTN; PAM sequence: CTG
aagggtagggatattcccgt

SEQ ID NO: 78851 - DNA, 20 bp, Artificial Sequence
  Description of Artificial Sequence: Synthetic oligonucleotide
  Target: SCNA; (+) strand; PAM type: YTN; PAM sequence: TTC
ccgtccctatccctcatctt

SEQ ID NO: 78852 - DNA, 20 bp, Artificial Sequence
  Description of Artificial Sequence: Synthetic oligonucleotide
  Target: SCNA; (+) strand; PAM type: YTN; PAM sequence: CTA
tccctcatcttttccccctt

SEQ ID NO: 78853 - DNA, 20 bp, Artificial Sequence
  Description of Artificial Sequence: Synthetic oligonucleotide
  Target: SCNA; (+) strand; PAM type: YTN; PAM sequence: CTC
atcttttccccctttgcaga

SEQ ID NO: 78854 - DNA, 20 bp, Artificial Sequence
  Description of Artificial Sequence: Synthetic oligonucleotide
  Target: SCNA; (+) strand; PAM type: YTN; PAM sequence: CTT
ttccccctttgcagataaac

SEQ ID NO: 78855 - DNA, 20 bp, Artificial Sequence
  Description of Artificial Sequence: Synthetic oligonucleotide
  Target: SCNA; (+) strand; PAM type: YTN; PAM sequence: TTT
tccccctttgcagataaacc

SEQ ID NO: 78856 - DNA, 20 bp, Artificial Sequence
  Description of Artificial Sequence: Synthetic oligonucleotide
  Target: SCNA; (+) strand; PAM type: YTN; PAM sequence: TTT
ccccctttgcagataaacca

SEQ ID NO: 78857 - DNA, 20 bp, Artificial Sequence
  Description of Artificial Sequence: Synthetic oligonucleotide
  Target: SCNA; (+) strand; PAM type: YTN; PAM sequence: TTC
cccctttgcagataaaccat

SEQ ID NO: 78858 - DNA, 20 bp, Artificial Sequence
  Description of Artificial Sequence: Synthetic oligonucleotide
  Target: SCNA; (+) strand; PAM type: YTN; PAM sequence: CTT
tgcagataaaccatcccact

SEQ ID NO: 78859 - DNA, 20 bp, Artificial Sequence
  Description of Artificial Sequence: Synthetic oligonucleotide
  Target: SCNA; (+) strand; PAM type: YTN; PAM sequence: TTT
gcagataaaccatcccactt

SEQ ID NO: 78860 - DNA, 20 bp, Artificial Sequence
  Description of Artificial Sequence: Synthetic oligonucleotide
  Target: SCNA; (+) strand; PAM type: YTN; PAM sequence: TTG
cagataaaccatcccacttt

SEQ ID NO: 78861 - DNA, 20 bp, Artificial Sequence
  Description of Artificial Sequence: Synthetic oligonucleotide
  Target: SCNA; (+) strand; PAM type: YTN; PAM sequence: CTT
tcaaatgaacttgggaggag

SEQ ID NO: 78862 - DNA, 20 bp, Artificial Sequence
  Description of Artificial Sequence: Synthetic oligonucleotide
  Target: SCNA; (+) strand; PAM type: YTN; PAM sequence: TTT
caaatgaacttgggaggagg

SEQ ID NO: 78863 - DNA, 20 bp, Artificial Sequence
  Description of Artificial Sequence: Synthetic oligonucleotide
  Target: SCNA; (+) strand; PAM type: YTN; PAM sequence: TTC
aaatgaacttgggaggaggg

SEQ ID NO: 78864 - DNA, 20 bp, Artificial Sequence
  Description of Artificial Sequence: Synthetic oligonucleotide
  Target: SCNA; (+) strand; PAM type: YTN; PAM sequence: CTT
gggaggagggggctttgaac

SEQ ID NO: 78865 - DNA, 20 bp, Artificial Sequence
  Description of Artificial Sequence: Synthetic oligonucleotide
  Target: SCNA; (+) strand; PAM type: YTN; PAM sequence: TTG
ggaggagggggctttgaact

SEQ ID NO: 78866 - DNA, 20 bp, Artificial Sequence
  Description of Artificial Sequence: Synthetic oligonucleotide
  Target: SCNA; (+) strand; PAM type: YTN; PAM sequence: CTT
tgaactgtgcttggggttgt

SEQ ID NO: 78867 - DNA, 20 bp, Artificial Sequence
  Description of Artificial Sequence: Synthetic oligonucleotide
  Target: SCNA; (+) strand; PAM type: YTN; PAM sequence: TTT
gaactgtgcttggggttgtt

SEQ ID NO: 78868 - DNA, 20 bp, Artificial Sequence
  Description of Artificial Sequence: Synthetic oligonucleotide
  Target: SCNA; (+) strand; PAM type: YTN; PAM sequence: TTG
aactgtgcttggggttgttt

SEQ ID NO: 78869 - DNA, 20 bp, Artificial Sequence
  Description of Artificial Sequence: Synthetic oligonucleotide
  Target: SCNA; (+) strand; PAM type: YTN; PAM sequence: CTG
tgcttggggttgtttctcct

SEQ ID NO: 78870 - DNA, 20 bp, Artificial Sequence
  Description of Artificial Sequence: Synthetic oligonucleotide
  Target: SCNA; (+) strand; PAM type: YTN; PAM sequence: CTT
ggggttgtttctcctctgga

SEQ ID NO: 78871 - DNA, 20 bp, Artificial Sequence
  Description of Artificial Sequence: Synthetic oligonucleotide
  Target: SCNA; (+) strand; PAM type: YTN; PAM sequence: TTG
gggttgtttctcctctggaa

SEQ ID NO: 78872 - DNA, 20 bp, Artificial Sequence
  Description of Artificial Sequence: Synthetic oligonucleotide
  Target: SCNA; (+) strand; PAM type: YTN; PAM sequence: TTG
tttctcctctggaaatgctt

SEQ ID NO: 78873 - DNA, 20 bp, Artificial Sequence
  Description of Artificial Sequence: Synthetic oligonucleotide
  Target: SCNA; (+) strand; PAM type: YTN; PAM sequence: TTT
ctcctctggaaatgcttcca

SEQ ID NO: 78874 - DNA, 20 bp, Artificial Sequence
  Description of Artificial Sequence: Synthetic oligonucleotide
  Target: SCNA; (+) strand; PAM type: YTN; PAM sequence: TTC
tcctctggaaatgcttccat

SEQ ID NO: 78875 - DNA, 20 bp, Artificial Sequence
  Description of Artificial Sequence: Synthetic oligonucleotide
  Target: SCNA; (+) strand; PAM type: YTN; PAM sequence: CTC
ctctggaaatgcttccattc

SEQ ID NO: 78876 - DNA, 20 bp, Artificial Sequence
  Description of Artificial Sequence: Synthetic oligonucleotide
  Target: SCNA; (+) strand; PAM type: YTN; PAM sequence: CTC
tggaaatgcttccattctaa

SEQ ID NO: 78877 - DNA, 20 bp, Artificial Sequence
  Description of Artificial Sequence: Synthetic oligonucleotide
  Target: SCNA; (+) strand; PAM type: YTN; PAM sequence: CTG
gaaatgcttccattctaaaa

SEQ ID NO: 78878 - DNA, 20 bp, Artificial Sequence
  Description of Artificial Sequence: Synthetic oligonucleotide
  Target: SCNA; (+) strand; PAM type: YTN; PAM sequence: CTT
ccattctaaaaagttctggc

SEQ ID NO: 78879 - DNA, 20 bp, Artificial Sequence
  Description of Artificial Sequence: Synthetic oligonucleotide
  Target: SCNA; (+) strand; PAM type: YTN; PAM sequence: TTC
cattctaaaaagttctggca

SEQ ID NO: 78880 - DNA, 20 bp, Artificial Sequence
  Description of Artificial Sequence: Synthetic oligonucleotide
  Target: SCNA; (+) strand; PAM type: YTN; PAM sequence: TTC
taaaaagttctggcataggg

SEQ ID NO: 78881 - DNA, 20 bp, Artificial Sequence
  Description of Artificial Sequence: Synthetic oligonucleotide
  Target: SCNA; (+) strand; PAM type: YTN; PAM sequence: CTA
aaaagttctggcatagggaa

SEQ ID NO: 78882 - DNA, 20 bp, Artificial Sequence
  Description of Artificial Sequence: Synthetic oligonucleotide
  Target: SCNA; (+) strand; PAM type: YTN; PAM sequence: TTC
tggcatagggaattggccta

SEQ ID NO: 78883 - DNA, 20 bp, Artificial Sequence
  Description of Artificial Sequence: Synthetic oligonucleotide
  Target: SCNA; (+) strand; PAM type: YTN; PAM sequence: CTG
gcatagggaattggcctaag

SEQ ID NO: 78884 - DNA, 20 bp, Artificial Sequence
  Description of Artificial Sequence: Synthetic oligonucleotide
  Target: SCNA; (+) strand; PAM type: YTN; PAM sequence: TTG
gcctaaggaaaaactctgcc

SEQ ID NO: 78885 - DNA, 20 bp, Artificial Sequence
  Description of Artificial Sequence: Synthetic oligonucleotide
  Target: SCNA; (+) strand; PAM type: YTN; PAM sequence: CTA
aggaaaaactctgccctcct

SEQ ID NO: 78886 - DNA, 20 bp, Artificial Sequence
  Description of Artificial Sequence: Synthetic oligonucleotide
  Target: SCNA; (+) strand; PAM type: YTN; PAM sequence: CTC
tgccctccttccccttaatg

SEQ ID NO: 78887 - DNA, 20 bp, Artificial Sequence
  Description of Artificial Sequence: Synthetic oligonucleotide
  Target: SCNA; (+) strand; PAM type: YTN; PAM sequence: CTG
ccctccttccccttaatgga

SEQ ID NO: 78888 - DNA, 20 bp, Artificial Sequence
  Description of Artificial Sequence: Synthetic oligonucleotide
  Target: SCNA; (+) strand; PAM type: YTN; PAM sequence: CTC
cttccccttaatggactgtc

SEQ ID NO: 78889 - DNA, 20 bp, Artificial Sequence
  Description of Artificial Sequence: Synthetic oligonucleotide
  Target: SCNA; (+) strand; PAM type: YTN; PAM sequence: CTT
ccccttaatggactgtcctg

SEQ ID NO: 78890 - DNA, 20 bp, Artificial Sequence
  Description of Artificial Sequence: Synthetic oligonucleotide
  Target: SCNA; (+) strand; PAM type: YTN; PAM sequence: TTC
cccttaatggactgtcctgc

SEQ ID NO: 78891 - DNA, 20 bp, Artificial Sequence
  Description of Artificial Sequence: Synthetic oligonucleotide
  Target: SCNA; (+) strand; PAM type: YTN; PAM sequence: CTT
aatggactgtcctgcctttg

SEQ ID NO: 78892 - DNA, 20 bp, Artificial Sequence
  Description of Artificial Sequence: Synthetic oligonucleotide
  Target: SCNA; (+) strand; PAM type: YTN; PAM sequence: TTA
atggactgtcctgcctttga

SEQ ID NO: 78893 - DNA, 20 bp, Artificial Sequence
  Description of Artificial Sequence: Synthetic oligonucleotide
  Target: SCNA; (+) strand; PAM type: YTN; PAM sequence: CTG
tcctgcctttgagtgtgagt

SEQ ID NO: 78894 - DNA, 20 bp, Artificial Sequence
  Description of Artificial Sequence: Synthetic oligonucleotide
  Target: SCNA; (+) strand; PAM type: YTN; PAM sequence: CTG
cctttgagtgtgagtaaaag

SEQ ID NO: 78895 - DNA, 20 bp, Artificial Sequence
  Description of Artificial Sequence: Synthetic oligonucleotide
  Target: SCNA; (+) strand; PAM type: YTN; PAM sequence: CTT
tgagtgtgagtaaaaggggc

SEQ ID NO: 78896 - DNA, 20 bp, Artificial Sequence
  Description of Artificial Sequence: Synthetic oligonucleotide
  Target: SCNA; (+) strand; PAM type: YTN; PAM sequence: TTT
gagtgtgagtaaaaggggct

SEQ ID NO: 78897 - DNA, 20 bp, Artificial Sequence
  Description of Artificial Sequence: Synthetic oligonucleotide
  Target: SCNA; (+) strand; PAM type: YTN; PAM sequence: TTG
agtgtgagtaaaaggggctg

SEQ ID NO: 78898 - DNA, 20 bp, Artificial Sequence
  Description of Artificial Sequence: Synthetic oligonucleotide
  Target: SCNA; (+) strand; PAM type: YTN; PAM sequence: CTG
agatcattcatcagccaatt

SEQ ID NO: 78899 - DNA, 20 bp, Artificial Sequence
  Description of Artificial Sequence: Synthetic oligonucleotide
  Target: SCNA; (+) strand; PAM type: YTN; PAM sequence: TTC
atcagccaattttacagctg

SEQ ID NO: 78900 - DNA, 20 bp, Artificial Sequence
  Description of Artificial Sequence: Synthetic oligonucleotide
  Target: SCNA; (+) strand; PAM type: YTN; PAM sequence: TTT
tacagctgcaatctacttag

SEQ ID NO: 78901 - DNA, 20 bp, Artificial Sequence
  Description of Artificial Sequence: Synthetic oligonucleotide
  Target: SCNA; (+) strand; PAM type: YTN; PAM sequence: TTT
acagctgcaatctacttaga

SEQ ID NO: 78902 - DNA, 20 bp, Artificial Sequence
  Description of Artificial Sequence: Synthetic oligonucleotide
  Target: SCNA; (+) strand; PAM type: YTN; PAM sequence: TTA
cagctgcaatctacttagac

SEQ ID NO: 78903 - DNA, 20 bp, Artificial Sequence
  Description of Artificial Sequence: Synthetic oligonucleotide
  Target: SCNA; (+) strand; PAM type: YTN; PAM sequence: CTG
caatctacttagacctgccc

SEQ ID NO: 78904 - DNA, 20 bp, Artificial Sequence
  Description of Artificial Sequence: Synthetic oligonucleotide
  Target: SCNA; (+) strand; PAM type: YTN; PAM sequence: CTA
cttagacctgcccccatcta

SEQ ID NO: 78905 - DNA, 20 bp, Artificial Sequence
  Description of Artificial Sequence: Synthetic oligonucleotide
  Target: SCNA; (+) strand; PAM type: YTN; PAM sequence: CTT
agacctgcccccatctaggt

SEQ ID NO: 78906 - DNA, 20 bp, Artificial Sequence
  Description of Artificial Sequence: Synthetic oligonucleotide
  Target: SCNA; (+) strand; PAM type: YTN; PAM sequence: TTA
gacctgcccccatctaggtc

SEQ ID NO: 78907 - DNA, 20 bp, Artificial Sequence
  Description of Artificial Sequence: Synthetic oligonucleotide
  Target: SCNA; (+) strand; PAM type: YTN; PAM sequence: CTG
cccccatctaggtcaccaag

SEQ ID NO: 78908 - DNA, 20 bp, Artificial Sequence
  Description of Artificial Sequence: Synthetic oligonucleotide
  Target: SCNA; (+) strand; PAM type: YTN; PAM sequence: CTA
ggtcaccaaggatctttgtc

SEQ ID NO: 78909 - DNA, 20 bp, Artificial Sequence
  Description of Artificial Sequence: Synthetic oligonucleotide
  Target: SCNA; (+) strand; PAM type: YTN; PAM sequence: CTT
tgtcagcatttggtacaaag

SEQ ID NO: 78910 - DNA, 20 bp, Artificial Sequence
  Description of Artificial Sequence: Synthetic oligonucleotide
  Target: SCNA; (+) strand; PAM type: YTN; PAM sequence: TTT
gtcagcatttggtacaaagc

SEQ ID NO: 78911 - DNA, 20 bp, Artificial Sequence
  Description of Artificial Sequence: Synthetic oligonucleotide
  Target: SCNA; (+) strand; PAM type: YTN; PAM sequence: TTG
tcagcatttggtacaaagcc

SEQ ID NO: 78912 - DNA, 20 bp, Artificial Sequence
  Description of Artificial Sequence: Synthetic oligonucleotide
  Target: SCNA; (+) strand; PAM type: YTN; PAM sequence: TTT
ggtacaaagcctatgtgaat

SEQ ID NO: 78913 - DNA, 20 bp, Artificial Sequence
  Description of Artificial Sequence: Synthetic oligonucleotide
  Target: SCNA; (+) strand; PAM type: YTN; PAM sequence: TTG
gtacaaagcctatgtgaatg

SEQ ID NO: 78914 - DNA, 20 bp, Artificial Sequence
  Description of Artificial Sequence: Synthetic oligonucleotide
  Target: SCNA; (+) strand; PAM type: YTN; PAM sequence: CTA
tgtgaatgaagatggtcatt

SEQ ID NO: 78915 - DNA, 20 bp, Artificial Sequence
  Description of Artificial Sequence: Synthetic oligonucleotide
  Target: SCNA; (+) strand; PAM type: YTN; PAM sequence: TTT
ctttggtgttgtcccaagaa

SEQ ID NO: 78916 - DNA, 20 bp, Artificial Sequence
  Description of Artificial Sequence: Synthetic oligonucleotide
  Target: SCNA; (+) strand; PAM type: YTN; PAM sequence: TTC
tttggtgttgtcccaagaaa

SEQ ID NO: 78917 - DNA, 20 bp, Artificial Sequence
  Description of Artificial Sequence: Synthetic oligonucleotide
  Target: SCNA; (+) strand; PAM type: YTN; PAM sequence: CTT
tggtgttgtcccaagaaatg

SEQ ID NO: 78918 - DNA, 20 bp, Artificial Sequence
  Description of Artificial Sequence: Synthetic oligonucleotide
  Target: SCNA; (+) strand; PAM type: YTN; PAM sequence: TTT
ggtgttgtcccaagaaatgt

SEQ ID NO: 78919 - DNA, 20 bp, Artificial Sequence
  Description of Artificial Sequence: Synthetic oligonucleotide
  Target: SCNA; (+) strand; PAM type: YTN; PAM sequence: TTG
gtgttgtcccaagaaatgta

SEQ ID NO: 78920 - DNA, 20 bp, Artificial Sequence
  Description of Artificial Sequence: Synthetic oligonucleotide
  Target: SCNA; (+) strand; PAM type: YTN; PAM sequence: TTG
tcccaagaaatgtaacagaa

SEQ ID NO: 78921 - DNA, 20 bp, Artificial Sequence
  Description of Artificial Sequence: Synthetic oligonucleotide
  Target: SCNA; (+) strand; PAM type: YTN; PAM sequence: CTA
taaaagaatggattctgata

SEQ ID NO: 78922 - DNA, 20 bp, Artificial Sequence
  Description of Artificial Sequence: Synthetic oligonucleotide
  Target: SCNA; (+) strand; PAM type: YTN; PAM sequence: TTC
tgatatgggatgctgagtcc

SEQ ID NO: 78923 - DNA, 20 bp, Artificial Sequence
  Description of Artificial Sequence: Synthetic oligonucleotide
  Target: SCNA; (+) strand; PAM type: YTN; PAM sequence: CTG
atatgggatgctgagtcctg

SEQ ID NO: 78924 - DNA, 20 bp, Artificial Sequence
  Description of Artificial Sequence: Synthetic oligonucleotide
  Target: SCNA; (+) strand; PAM type: YTN; PAM sequence: CTG
agtcctgataatctctctaa

SEQ ID NO: 78925 - DNA, 20 bp, Artificial Sequence
  Description of Artificial Sequence: Synthetic oligonucleotide
  Target: SCNA; (+) strand; PAM type: YTN; PAM sequence: CTG
ataatctctctaaatgtctt

SEQ ID NO: 78926 - DNA, 20 bp, Artificial Sequence
  Description of Artificial Sequence: Synthetic oligonucleotide
  Target: SCNA; (+) strand; PAM type: YTN; PAM sequence: CTC
tctaaatgtctttcatctag

SEQ ID NO: 78927 - DNA, 20 bp, Artificial Sequence
  Description of Artificial Sequence: Synthetic oligonucleotide
  Target: SCNA; (+) strand; PAM type: YTN; PAM sequence: CTC
taaatgtctttcatctagga

SEQ ID NO: 78928 - DNA, 20 bp, Artificial Sequence
  Description of Artificial Sequence: Synthetic oligonucleotide
  Target: SCNA; (+) strand; PAM type: YTN; PAM sequence: CTA
aatgtctttcatctaggacc

SEQ ID NO: 78929 - DNA, 20 bp, Artificial Sequence
  Description of Artificial Sequence: Synthetic oligonucleotide
  Target: SCNA; (+) strand; PAM type: YTN; PAM sequence: CTT
tcatctaggacctgcaatca

SEQ ID NO: 78930 - DNA, 20 bp, Artificial Sequence
  Description of Artificial Sequence: Synthetic oligonucleotide
  Target: SCNA; (+) strand; PAM type: YTN; PAM sequence: TTT
catctaggacctgcaatcag

SEQ ID NO: 78931 - DNA, 20 bp, Artificial Sequence
  Description of Artificial Sequence: Synthetic oligonucleotide
  Target: SCNA; (+) strand; PAM type: YTN; PAM sequence: TTC
atctaggacctgcaatcagc

SEQ ID NO: 78932 - DNA, 20 bp, Artificial Sequence
  Description of Artificial Sequence: Synthetic oligonucleotide
  Target: SCNA; (+) strand; PAM type: YTN; PAM sequence: CTA
ggacctgcaatcagccatta

SEQ ID NO: 78933 - DNA, 20 bp, Artificial Sequence
  Description of Artificial Sequence: Synthetic oligonucleotide
  Target: SCNA; (+) strand; PAM type: YTN; PAM sequence: CTG
caatcagccattattaagaa

SEQ ID NO: 78934 - DNA, 20 bp, Artificial Sequence
  Description of Artificial Sequence: Synthetic oligonucleotide
  Target: SCNA; (+) strand; PAM type: YTN; PAM sequence: TTA
ttaagaaaaagagaaaagga

SEQ ID NO: 78935 - DNA, 20 bp, Artificial Sequence
  Description of Artificial Sequence: Synthetic oligonucleotide
  Target: SCNA; (+) strand; PAM type: YTN; PAM sequence: TTA
agaaaaagagaaaaggattg

SEQ ID NO: 78936 - DNA, 20 bp, Artificial Sequence
  Description of Artificial Sequence: Synthetic oligonucleotide
  Target: SCNA; (+) strand; PAM type: YTN; PAM sequence: TTG
caggggacagttccaattaa

SEQ ID NO: 78937 - DNA, 20 bp, Artificial Sequence
  Description of Artificial Sequence: Synthetic oligonucleotide
  Target: SCNA; (+) strand; PAM type: YTN; PAM sequence: TTC
caattaacctgtggcatccc

SEQ ID NO: 78938 - DNA, 20 bp, Artificial Sequence
  Description of Artificial Sequence: Synthetic oligonucleotide
  Target: SCNA; (+) strand; PAM type: YTN; PAM sequence: TTA
acctgtggcatcccaaatct

SEQ ID NO: 78939 - DNA, 20 bp, Artificial Sequence
  Description of Artificial Sequence: Synthetic oligonucleotide
  Target: SCNA; (+) strand; PAM type: YTN; PAM sequence: CTG
tggcatcccaaatctgtgtt

SEQ ID NO: 78940 - DNA, 20 bp, Artificial Sequence
  Description of Artificial Sequence: Synthetic oligonucleotide
  Target: SCNA; (+) strand; PAM type: YTN; PAM sequence: CTG
tgttttactgaacacctaga

SEQ ID NO: 78941 - DNA, 20 bp, Artificial Sequence
  Description of Artificial Sequence: Synthetic oligonucleotide
  Target: SCNA; (+) strand; PAM type: YTN; PAM sequence: TTT
tactgaacacctagaactat

SEQ ID NO: 78942 - DNA, 20 bp, Artificial Sequence
  Description of Artificial Sequence: Synthetic oligonucleotide
  Target: SCNA; (+) strand; PAM type: YTN; PAM sequence: TTT
actgaacacctagaactatt

SEQ ID NO: 78943 - DNA, 20 bp, Artificial Sequence
  Description of Artificial Sequence: Synthetic oligonucleotide
  Target: SCNA; (+) strand; PAM type: YTN; PAM sequence: TTA
ctgaacacctagaactattc

SEQ ID NO: 78944 - DNA, 20 bp, Artificial Sequence
  Description of Artificial Sequence: Synthetic oligonucleotide
  Target: SCNA; (+) strand; PAM type: YTN; PAM sequence: CTG
aacacctagaactattctcc

SEQ ID NO: 78945 - DNA, 20 bp, Artificial Sequence
  Description of Artificial Sequence: Synthetic oligonucleotide
  Target: SCNA; (+) strand; PAM type: YTN; PAM sequence: CTA
gaactattctccatgggttt

SEQ ID NO: 78946 - DNA, 20 bp, Artificial Sequence
  Description of Artificial Sequence: Synthetic oligonucleotide
  Target: SCNA; (+) strand; PAM type: YTN; PAM sequence: CTA
ttctccatgggtttggcgtc

SEQ ID NO: 78947 - DNA, 20 bp, Artificial Sequence
  Description of Artificial Sequence: Synthetic oligonucleotide
  Target: SCNA; (+) strand; PAM type: YTN; PAM sequence: TTC
tccatgggtttggcgtcaaa

SEQ ID NO: 78948 - DNA, 20 bp, Artificial Sequence
  Description of Artificial Sequence: Synthetic oligonucleotide
  Target: SCNA; (+) strand; PAM type: YTN; PAM sequence: CTC
catgggtttggcgtcaaaga

SEQ ID NO: 78949 - DNA, 20 bp, Artificial Sequence
  Description of Artificial Sequence: Synthetic oligonucleotide
  Target: SCNA; (+) strand; PAM type: YTN; PAM sequence: TTT
ggcgtcaaagaggcattagg

SEQ ID NO: 78950 - DNA, 20 bp, Artificial Sequence
  Description of Artificial Sequence: Synthetic oligonucleotide
  Target: SCNA; (+) strand; PAM type: YTN; PAM sequence: TTG
gcgtcaaagaggcattagga

SEQ ID NO: 78951 - DNA, 20 bp, Artificial Sequence
  Description of Artificial Sequence: Synthetic oligonucleotide
  Target: SCNA; (+) strand; PAM type: YTN; PAM sequence: TTA
ggaaagatggtaactattcc

SEQ ID NO: 78952 - DNA, 20 bp, Artificial Sequence
  Description of Artificial Sequence: Synthetic oligonucleotide
  Target: SCNA; (+) strand; PAM type: YTN; PAM sequence: CTA
ttcctcttacatacaatatt

SEQ ID NO: 78953 - DNA, 20 bp, Artificial Sequence
  Description of Artificial Sequence: Synthetic oligonucleotide
  Target: SCNA; (+) strand; PAM type: YTN; PAM sequence: TTC
ctcttacatacaatattaag

SEQ ID NO: 78954 - DNA, 20 bp, Artificial Sequence
  Description of Artificial Sequence: Synthetic oligonucleotide
  Target: SCNA; (+) strand; PAM type: YTN; PAM sequence: CTC
ttacatacaatattaaggcc

SEQ ID NO: 78955 - DNA, 20 bp, Artificial Sequence
  Description of Artificial Sequence: Synthetic oligonucleotide
  Target: SCNA; (+) strand; PAM type: YTN; PAM sequence: CTT
acatacaatattaaggcctt

SEQ ID NO: 78956 - DNA, 20 bp, Artificial Sequence
  Description of Artificial Sequence: Synthetic oligonucleotide
  Target: SCNA; (+) strand; PAM type: YTN; PAM sequence: TTA
catacaatattaaggccttt

SEQ ID NO: 78957 - DNA, 20 bp, Artificial Sequence
  Description of Artificial Sequence: Synthetic oligonucleotide
  Target: SCNA; (+) strand; PAM type: YTN; PAM sequence: TTA
aggcctttgagatttgcttc

SEQ ID NO: 78958 - DNA, 20 bp, Artificial Sequence
  Description of Artificial Sequence: Synthetic oligonucleotide
  Target: SCNA; (+) strand; PAM type: YTN; PAM sequence: CTT
tgagatttgcttcagcttaa

SEQ ID NO: 78959 - DNA, 20 bp, Artificial Sequence
  Description of Artificial Sequence: Synthetic oligonucleotide
  Target: SCNA; (+) strand; PAM type: YTN; PAM sequence: TTT
gagatttgcttcagcttaac

SEQ ID NO: 78960 - DNA, 20 bp, Artificial Sequence
  Description of Artificial Sequence: Synthetic oligonucleotide
  Target: SCNA; (+) strand; PAM type: YTN; PAM sequence: TTG
agatttgcttcagcttaaca

SEQ ID NO: 78961 - DNA, 20 bp, Artificial Sequence
  Description of Artificial Sequence: Synthetic oligonucleotide
  Target: SCNA; (+) strand; PAM type: YTN; PAM sequence: TTT
gcttcagcttaacagagata

SEQ ID NO: 78962 - DNA, 20 bp, Artificial Sequence
  Description of Artificial Sequence: Synthetic oligonucleotide
  Target: SCNA; (+) strand; PAM type: YTN; PAM sequence: TTG
cttcagcttaacagagatac

SEQ ID NO: 78963 - DNA, 20 bp, Artificial Sequence
  Description of Artificial Sequence: Synthetic oligonucleotide
  Target: SCNA; (+) strand; PAM type: YTN; PAM sequence: CTT
cagcttaacagagatacttt

SEQ ID NO: 78964 - DNA, 20 bp, Artificial Sequence
  Description of Artificial Sequence: Synthetic oligonucleotide
  Target: SCNA; (+) strand; PAM type: YTN; PAM sequence: TTC
agcttaacagagatactttt

SEQ ID NO: 78965 - DNA, 20 bp, Artificial Sequence
  Description of Artificial Sequence: Synthetic oligonucleotide
  Target: SCNA; (+) strand; PAM type: YTN; PAM sequence: CTT
aacagagatacttttaaact

SEQ ID NO: 78966 - DNA, 20 bp, Artificial Sequence
  Description of Artificial Sequence: Synthetic oligonucleotide
  Target: SCNA; (+) strand; PAM type: YTN; PAM sequence: TTA
acagagatacttttaaactt

SEQ ID NO: 78967 - DNA, 20 bp, Artificial Sequence
  Description of Artificial Sequence: Synthetic oligonucleotide
  Target: SCNA; (+) strand; PAM type: YTN; PAM sequence: CTT
ttaaactttgttaatttaaa

SEQ ID NO: 78968 - DNA, 20 bp, Artificial Sequence
  Description of Artificial Sequence: Synthetic oligonucleotide
  Target: SCNA; (+) strand; PAM type: YTN; PAM sequence: TTT
taaactttgttaatttaaat

SEQ ID NO: 78969 - DNA, 20 bp, Artificial Sequence
  Description of Artificial Sequence: Synthetic oligonucleotide
  Target: SCNA; (+) strand; PAM type: YTN; PAM sequence: TTT
aaactttgttaatttaaatg

SEQ ID NO: 78970 - DNA, 20 bp, Artificial Sequence
  Description of Artificial Sequence: Synthetic oligonucleotide
  Target: SCNA; (+) strand; PAM type: YTN; PAM sequence: TTA
aactttgttaatttaaatgt

SEQ ID NO: 78971 - DNA, 20 bp, Artificial Sequence
  Description of Artificial Sequence: Synthetic oligonucleotide
  Target: SCNA; (+) strand; PAM type: YTN; PAM sequence: CTT
tgttaatttaaatgtttccc

SEQ ID NO: 78972 - DNA, 20 bp, Artificial Sequence
  Description of Artificial Sequence: Synthetic oligonucleotide
  Target: SCNA; (+) strand; PAM type: YTN; PAM sequence: TTT
gttaatttaaatgtttccca

SEQ ID NO: 78973 - DNA, 20 bp, Artificial Sequence
  Description of Artificial Sequence: Synthetic oligonucleotide
  Target: SCNA; (+) strand; PAM type: YTN; PAM sequence: TTG
ttaatttaaatgtttcccaa

SEQ ID NO: 78974 - DNA, 20 bp, Artificial Sequence
  Description of Artificial Sequence: Synthetic oligonucleotide
  Target: SCNA; (+) strand; PAM type: YTN; PAM sequence: TTA
atttaaatgtttcccaaaat

SEQ ID NO: 78975 - DNA, 20 bp, Artificial Sequence
  Description of Artificial Sequence: Synthetic oligonucleotide
  Target: SCNA; (+) strand; PAM type: YTN; PAM sequence: TTT
aaatgtttcccaaaattatt

SEQ ID NO: 78976 - DNA, 20 bp, Artificial Sequence
  Description of Artificial Sequence: Synthetic oligonucleotide
  Target: SCNA; (+) strand; PAM type: YTN; PAM sequence: TTA
aatgtttcccaaaattattt

SEQ ID NO: 78977 - DNA, 20 bp, Artificial Sequence
  Description of Artificial Sequence: Synthetic oligonucleotide
  Target: SCNA; (+) strand; PAM type: YTN; PAM sequence: TTT
cccaaaattatttgagcaga

SEQ ID NO: 78978 - DNA, 20 bp, Artificial Sequence
  Description of Artificial Sequence: Synthetic oligonucleotide
  Target: SCNA; (+) strand; PAM type: YTN; PAM sequence: TTC
ccaaaattatttgagcagag

SEQ ID NO: 78979 - DNA, 20 bp, Artificial Sequence
  Description of Artificial Sequence: Synthetic oligonucleotide
  Target: SCNA; (+) strand; PAM type: YTN; PAM sequence: TTA
tttgagcagagaatccattc

SEQ ID NO: 78980 - DNA, 20 bp, Artificial Sequence
  Description of Artificial Sequence: Synthetic oligonucleotide
  Target: SCNA; (+) strand; PAM type: YTN; PAM sequence: TTT
gagcagagaatccattctaa

SEQ ID NO: 78981 - DNA, 20 bp, Artificial Sequence
  Description of Artificial Sequence: Synthetic oligonucleotide
  Target: SCNA; (+) strand; PAM type: YTN; PAM sequence: TTG
agcagagaatccattctaat

SEQ ID NO: 78982 - DNA, 20 bp, Artificial Sequence
  Description of Artificial Sequence: Synthetic oligonucleotide
  Target: SCNA; (+) strand; PAM type: YTN; PAM sequence: TTC
taattataccatgtgcataa

SEQ ID NO: 78983 - DNA, 20 bp, Artificial Sequence
  Description of Artificial Sequence: Synthetic oligonucleotide
  Target: SCNA; (+) strand; PAM type: YTN; PAM sequence: CTA
attataccatgtgcataata

SEQ ID NO: 78984 - DNA, 20 bp, Artificial Sequence
  Description of Artificial Sequence: Synthetic oligonucleotide
  Target: SCNA; (+) strand; PAM type: YTN; PAM sequence: TTA
taccatgtgcataatactca

SEQ ID NO: 78985 - DNA, 20 bp, Artificial Sequence
  Description of Artificial Sequence: Synthetic oligonucleotide
  Target: SCNA; (+) strand; PAM type: YTN; PAM sequence: CTC
aatggaatcacatgactttg

SEQ ID NO: 78986 - DNA, 20 bp, Artificial Sequence
  Description of Artificial Sequence: Synthetic oligonucleotide
  Target: SCNA; (+) strand; PAM type: YTN; PAM sequence: CTT
tggggaaatcagaggaaaac

SEQ ID NO: 78987 - DNA, 20 bp, Artificial Sequence
  Description of Artificial Sequence: Synthetic oligonucleotide
  Target: SCNA; (+) strand; PAM type: YTN; PAM sequence: TTT
ggggaaatcagaggaaaact

SEQ ID NO: 78988 - DNA, 20 bp, Artificial Sequence
  Description of Artificial Sequence: Synthetic oligonucleotide
  Target: SCNA; (+) strand; PAM type: YTN; PAM sequence: TTG
gggaaatcagaggaaaacta

SEQ ID NO: 78989 - DNA, 20 bp, Artificial Sequence
  Description of Artificial Sequence: Synthetic oligonucleotide
  Target: SCNA; (+) strand; PAM type: YTN; PAM sequence: CTA
atagtgattacattttattt

SEQ ID NO: 78990 - DNA, 20 bp, Artificial Sequence
  Description of Artificial Sequence: Synthetic oligonucleotide
  Target: SCNA; (+) strand; PAM type: YTN; PAM sequence: TTA
cattttatttagctaaataa

SEQ ID NO: 78991 - DNA, 20 bp, Artificial Sequence
  Description of Artificial Sequence: Synthetic oligonucleotide
  Target: SCNA; (+) strand; PAM type: YTN; PAM sequence: TTT
tatttagctaaataaaacgg

SEQ ID NO: 78992 - DNA, 20 bp, Artificial Sequence
  Description of Artificial Sequence: Synthetic oligonucleotide
  Target: SCNA; (+) strand; PAM type: YTN; PAM sequence: TTT
atttagctaaataaaacggc

SEQ ID NO: 78993 - DNA, 20 bp, Artificial Sequence
  Description of Artificial Sequence: Synthetic oligonucleotide
  Target: SCNA; (+) strand; PAM type: YTN; PAM sequence: TTA
tttagctaaataaaacggca

SEQ ID NO: 78994 - DNA, 20 bp, Artificial Sequence
  Description of Artificial Sequence: Synthetic oligonucleotide
  Target: SCNA; (+) strand; PAM type: YTN; PAM sequence: TTT
agctaaataaaacggcatgt

SEQ ID NO: 78995 - DNA, 20 bp, Artificial Sequence
  Description of Artificial Sequence: Synthetic oligonucleotide
  Target: SCNA; (+) strand; PAM type: YTN; PAM sequence: TTA
gctaaataaaacggcatgtt

SEQ ID NO: 78996 - DNA, 20 bp, Artificial Sequence
  Description of Artificial Sequence: Synthetic oligonucleotide
  Target: SCNA; (+) strand; PAM type: YTN; PAM sequence: CTA
aataaaacggcatgttcagt

SEQ ID NO: 78997 - DNA, 20 bp, Artificial Sequence
  Description of Artificial Sequence: Synthetic oligonucleotide
  Target: SCNA; (+) strand; PAM type: YTN; PAM sequence: TTC
agtgatgcttttccctcttt

SEQ ID NO: 78998 - DNA, 20 bp, Artificial Sequence
  Description of Artificial Sequence: Synthetic oligonucleotide
  Target: SCNA; (+) strand; PAM type: YTN; PAM sequence: CTT
ttccctctttgtgttataca

SEQ ID NO: 78999 - DNA, 20 bp, Artificial Sequence
  Description of Artificial Sequence: Synthetic oligonucleotide
  Target: SCNA; (+) strand; PAM type: YTN; PAM sequence: TTT
tccctctttgtgttatacaa

SEQ ID NO: 79000 - DNA, 20 bp, Artificial Sequence
  Description of Artificial Sequence: Synthetic oligonucleotide
  Target: SCNA; (+) strand; PAM type: YTN; PAM sequence: TTT
ccctctttgtgttatacaat

SEQ ID NO: 79001 - DNA, 20 bp, Artificial Sequence
  Description of Artificial Sequence: Synthetic oligonucleotide
  Target: SCNA; (+) strand; PAM type: YTN; PAM sequence: TTC
cctctttgtgttatacaatt

SEQ ID NO: 79002 - DNA, 20 bp, Artificial Sequence
  Description of Artificial Sequence: Synthetic oligonucleotide
  Target: SCNA; (+) strand; PAM type: YTN; PAM sequence: CTC
tttgtgttatacaatttact

SEQ ID NO: 79003 - DNA, 20 bp, Artificial Sequence
  Description of Artificial Sequence: Synthetic oligonucleotide
  Target: SCNA; (+) strand; PAM type: YTN; PAM sequence: CTT
tgtgttatacaatttactta

SEQ ID NO: 79004 - DNA, 20 bp, Artificial Sequence
  Description of Artificial Sequence: Synthetic oligonucleotide
  Target: SCNA; (+) strand; PAM type: YTN; PAM sequence: TTT
gtgttatacaatttacttac

SEQ ID NO: 79005 - DNA, 20 bp, Artificial Sequence
  Description of Artificial Sequence: Synthetic oligonucleotide
  Target: SCNA; (+) strand; PAM type: YTN; PAM sequence: TTG
tgttatacaatttacttact

SEQ ID NO: 79006 - DNA, 20 bp, Artificial Sequence
  Description of Artificial Sequence: Synthetic oligonucleotide
  Target: SCNA; (+) strand; PAM type: YTN; PAM sequence: TTA
tacaatttacttacttaata

SEQ ID NO: 79007 - DNA, 20 bp, Artificial Sequence
  Description of Artificial Sequence: Synthetic oligonucleotide
  Target: SCNA; (+) strand; PAM type: YTN; PAM sequence: TTT
acttacttaatatcatcaaa

SEQ ID NO: 79008 - DNA, 20 bp, Artificial Sequence
  Description of Artificial Sequence: Synthetic oligonucleotide
  Target: SCNA; (+) strand; PAM type: YTN; PAM sequence: TTA
cttacttaatatcatcaaac

SEQ ID NO: 79009 - DNA, 20 bp, Artificial Sequence
  Description of Artificial Sequence: Synthetic oligonucleotide
  Target: SCNA; (+) strand; PAM type: YTN; PAM sequence: CTT
acttaatatcatcaaactac

SEQ ID NO: 79010 - DNA, 20 bp, Artificial Sequence
  Description of Artificial Sequence: Synthetic oligonucleotide
  Target: SCNA; (+) strand; PAM type: YTN; PAM sequence: TTA
cttaatatcatcaaactaca

SEQ ID NO: 79011 - DNA, 20 bp, Artificial Sequence
  Description of Artificial Sequence: Synthetic oligonucleotide
  Target: SCNA; (+) strand; PAM type: YTN; PAM sequence: CTT
aatatcatcaaactacaaag

SEQ ID NO: 79012 - DNA, 20 bp, Artificial Sequence
  Description of Artificial Sequence: Synthetic oligonucleotide
  Target: SCNA; (+) strand; PAM type: YTN; PAM sequence: TTA
atatcatcaaactacaaagg

SEQ ID NO: 79013 - DNA, 20 bp, Artificial Sequence
  Description of Artificial Sequence: Synthetic oligonucleotide
  Target: SCNA; (+) strand; PAM type: YTN; PAM sequence: CTA
caaaggaatatggaaaagat

SEQ ID NO: 79014 - DNA, 20 bp, Artificial Sequence
  Description of Artificial Sequence: Synthetic oligonucleotide
  Target: SCNA; (+) strand; PAM type: YTN; PAM sequence: TTT
tctgtgatcatgtatcgaca

SEQ ID NO: 79015 - DNA, 20 bp, Artificial Sequence
  Description of Artificial Sequence: Synthetic oligonucleotide
  Target: SCNA; (+) strand; PAM type: YTN; PAM sequence: TTT
ctgtgatcatgtatcgacac

SEQ ID NO: 79016 - DNA, 20 bp, Artificial Sequence
  Description of Artificial Sequence: Synthetic oligonucleotide
  Target: SCNA; (+) strand; PAM type: YTN; PAM sequence: TTC
tgtgatcatgtatcgacaca

SEQ ID NO: 79017 - DNA, 20 bp, Artificial Sequence
  Description of Artificial Sequence: Synthetic oligonucleotide
  Target: SCNA; (+) strand; PAM type: YTN; PAM sequence: CTG
tgatcatgtatcgacacact

SEQ ID NO: 79018 - DNA, 20 bp, Artificial Sequence
  Description of Artificial Sequence: Synthetic oligonucleotide
  Target: SCNA; (+) strand; PAM type: YTN; PAM sequence: CTT
cttagagaaaatgtaagttc

SEQ ID NO: 79019 - DNA, 20 bp, Artificial Sequence
  Description of Artificial Sequence: Synthetic oligonucleotide
  Target: SCNA; (+) strand; PAM type: YTN; PAM sequence: TTC
ttagagaaaatgtaagttct

SEQ ID NO: 79020 - DNA, 20 bp, Artificial Sequence
  Description of Artificial Sequence: Synthetic oligonucleotide
  Target: SCNA; (+) strand; PAM type: YTN; PAM sequence: CTT
agagaaaatgtaagttcttg

SEQ ID NO: 79021 - DNA, 20 bp, Artificial Sequence
  Description of Artificial Sequence: Synthetic oligonucleotide
  Target: SCNA; (+) strand; PAM type: YTN; PAM sequence: TTA
gagaaaatgtaagttcttgg

SEQ ID NO: 79022 - DNA, 20 bp, Artificial Sequence
  Description of Artificial Sequence: Synthetic oligonucleotide
  Target: SCNA; (+) strand; PAM type: YTN; PAM sequence: TTC
ttggcaaaatattacaactg

SEQ ID NO: 79023 - DNA, 20 bp, Artificial Sequence
  Description of Artificial Sequence: Synthetic oligonucleotide
  Target: SCNA; (+) strand; PAM type: YTN; PAM sequence: CTT
ggcaaaatattacaactgta

SEQ ID NO: 79024 - DNA, 20 bp, Artificial Sequence
  Description of Artificial Sequence: Synthetic oligonucleotide
  Target: SCNA; (+) strand; PAM type: YTN; PAM sequence: TTG
gcaaaatattacaactgtat

SEQ ID NO: 79025 - DNA, 20 bp, Artificial Sequence
  Description of Artificial Sequence: Synthetic oligonucleotide
  Target: SCNA; (+) strand; PAM type: YTN; PAM sequence: TTA
caactgtataatgcactaca

SEQ ID NO: 79026 - DNA, 20 bp, Artificial Sequence
  Description of Artificial Sequence: Synthetic oligonucleotide
  Target: SCNA; (+) strand; PAM type: YTN; PAM sequence: CTG
tataatgcactacaattttt

SEQ ID NO: 79027 - DNA, 20 bp, Artificial Sequence
  Description of Artificial Sequence: Synthetic oligonucleotide
  Target: SCNA; (+) strand; PAM type: YTN; PAM sequence: CTA
caatttttaaaaatcttttg

SEQ ID NO: 79028 - DNA, 20 bp, Artificial Sequence
  Description of Artificial Sequence: Synthetic oligonucleotide
  Target: SCNA; (+) strand; PAM type: YTN; PAM sequence: TTT
ttaaaaatcttttgtctgca

SEQ ID NO: 79029 - DNA, 20 bp, Artificial Sequence
  Description of Artificial Sequence: Synthetic oligonucleotide
  Target: SCNA; (+) strand; PAM type: YTN; PAM sequence: TTT
taaaaatcttttgtctgcat

SEQ ID NO: 79030 - DNA, 20 bp, Artificial Sequence
  Description of Artificial Sequence: Synthetic oligonucleotide
  Target: SCNA; (+) strand; PAM type: YTN; PAM sequence: TTT
aaaaatcttttgtctgcatt

SEQ ID NO: 79031 - DNA, 20 bp, Artificial Sequence
  Description of Artificial Sequence: Synthetic oligonucleotide
  Target: SCNA; (+) strand; PAM type: YTN; PAM sequence: TTA
aaaatcttttgtctgcatta

SEQ ID NO: 79032 - DNA, 20 bp, Artificial Sequence
  Description of Artificial Sequence: Synthetic oligonucleotide
  Target: SCNA; (+) strand; PAM type: YTN; PAM sequence: CTT
ttgtctgcattatcttattt

SEQ ID NO: 79033 - DNA, 20 bp, Artificial Sequence
  Description of Artificial Sequence: Synthetic oligonucleotide
  Target: SCNA; (+) strand; PAM type: YTN; PAM sequence: TTT
tgtctgcattatcttatttc

SEQ ID NO: 79034 - DNA, 20 bp, Artificial Sequence
  Description of Artificial Sequence: Synthetic oligonucleotide
  Target: SCNA; (+) strand; PAM type: YTN; PAM sequence: TTT
gtctgcattatcttatttca

SEQ ID NO: 79035 - DNA, 20 bp, Artificial Sequence
  Description of Artificial Sequence: Synthetic oligonucleotide
  Target: SCNA; (+) strand; PAM type: YTN; PAM sequence: TTG
tctgcattatcttatttcat

SEQ ID NO: 79036 - DNA, 20 bp, Artificial Sequence
  Description of Artificial Sequence: Synthetic oligonucleotide
  Target: SCNA; (+) strand; PAM type: YTN; PAM sequence: CTG
cattatcttatttcattcac

SEQ ID NO: 79037 - DNA, 20 bp, Artificial Sequence
  Description of Artificial Sequence: Synthetic oligonucleotide
  Target: SCNA; (+) strand; PAM type: YTN; PAM sequence: TTA
tcttatttcattcacactcc

SEQ ID NO: 79038 - DNA, 20 bp, Artificial Sequence
  Description of Artificial Sequence: Synthetic oligonucleotide
  Target: SCNA; (+) strand; PAM type: YTN; PAM sequence: CTT
atttcattcacactccaacc

SEQ ID NO: 79039 - DNA, 20 bp, Artificial Sequence
  Description of Artificial Sequence: Synthetic oligonucleotide
  Target: SCNA; (+) strand; PAM type: YTN; PAM sequence: TTA
tttcattcacactccaaccc

SEQ ID NO: 79040 - DNA, 20 bp, Artificial Sequence
  Description of Artificial Sequence: Synthetic oligonucleotide
  Target: SCNA; (+) strand; PAM type: YTN; PAM sequence: TTT
cattcacactccaaccctgg

SEQ ID NO: 79041 - DNA, 20 bp, Artificial Sequence
  Description of Artificial Sequence: Synthetic oligonucleotide
  Target: SCNA; (+) strand; PAM type: YTN; PAM sequence: TTC
attcacactccaaccctggg

SEQ ID NO: 79042 - DNA, 20 bp, Artificial Sequence
  Description of Artificial Sequence: Synthetic oligonucleotide
  Target: SCNA; (+) strand; PAM type: YTN; PAM sequence: TTC
acactccaaccctgggcagt

SEQ ID NO: 79043 - DNA, 20 bp, Artificial Sequence
  Description of Artificial Sequence: Synthetic oligonucleotide
  Target: SCNA; (+) strand; PAM type: YTN; PAM sequence: CTC
caaccctgggcagttggctg

SEQ ID NO: 79044 - DNA, 20 bp, Artificial Sequence
  Description of Artificial Sequence: Synthetic oligonucleotide
  Target: SCNA; (+) strand; PAM type: YTN; PAM sequence: CTG
ggcagttggctggccagtta

SEQ ID NO: 79045 - DNA, 20 bp, Artificial Sequence
  Description of Artificial Sequence: Synthetic oligonucleotide
  Target: SCNA; (+) strand; PAM type: YTN; PAM sequence: TTG
gctggccagttacagatgag

SEQ ID NO: 79046 - DNA, 20 bp, Artificial Sequence
  Description of Artificial Sequence: Synthetic oligonucleotide
  Target: SCNA; (+) strand; PAM type: YTN; PAM sequence: CTG
gccagttacagatgagtagc

SEQ ID NO: 79047 - DNA, 20 bp, Artificial Sequence
  Description of Artificial Sequence: Synthetic oligonucleotide
  Target: SCNA; (+) strand; PAM type: YTN; PAM sequence: TTA
cagatgagtagctatggttt

SEQ ID NO: 79048 - DNA, 20 bp, Artificial Sequence
  Description of Artificial Sequence: Synthetic oligonucleotide
  Target: SCNA; (+) strand; PAM type: YTN; PAM sequence: CTA
tggtttagaaaggttacatg

SEQ ID NO: 79049 - DNA, 20 bp, Artificial Sequence
  Description of Artificial Sequence: Synthetic oligonucleotide
  Target: SCNA; (+) strand; PAM type: YTN; PAM sequence: TTT
agaaaggttacatgagttgc

SEQ ID NO: 79050 - DNA, 20 bp, Artificial Sequence
  Description of Artificial Sequence: Synthetic oligonucleotide
  Target: SCNA; (+) strand; PAM type: YTN; PAM sequence: TTA
gaaaggttacatgagttgcc

SEQ ID NO: 79051 - DNA, 20 bp, Artificial Sequence
  Description of Artificial Sequence: Synthetic oligonucleotide
  Target: SCNA; (+) strand; PAM type: YTN; PAM sequence: TTA
catgagttgccagggatctg

SEQ ID NO: 79052 - DNA, 20 bp, Artificial Sequence
  Description of Artificial Sequence: Synthetic oligonucleotide
  Target: SCNA; (+) strand; PAM type: YTN; PAM sequence: TTG
ccagggatctggcaacgcat

SEQ ID NO: 79053 - DNA, 20 bp, Artificial Sequence
  Description of Artificial Sequence: Synthetic oligonucleotide
  Target: SCNA; (+) strand; PAM type: YTN; PAM sequence: CTG
gcaacgcataattgaataca

SEQ ID NO: 79054 - DNA, 20 bp, Artificial Sequence
  Description of Artificial Sequence: Synthetic oligonucleotide
  Target: SCNA; (+) strand; PAM type: YTN; PAM sequence: TTG
aatacattgtcttaagattc

SEQ ID NO: 79055 - DNA, 20 bp, Artificial Sequence
  Description of Artificial Sequence: Synthetic oligonucleotide
  Target: SCNA; (+) strand; PAM type: YTN; PAM sequence: TTG
tcttaagattcaagctatta

SEQ ID NO: 79056 - DNA, 20 bp, Artificial Sequence
  Description of Artificial Sequence: Synthetic oligonucleotide
  Target: SCNA; (+) strand; PAM type: YTN; PAM sequence: CTT
aagattcaagctattaaaca

SEQ ID NO: 79057 - DNA, 20 bp, Artificial Sequence
  Description of Artificial Sequence: Synthetic oligonucleotide
  Target: SCNA; (+) strand; PAM type: YTN; PAM sequence: TTA
agattcaagctattaaacac

SEQ ID NO: 79058 - DNA, 20 bp, Artificial Sequence
  Description of Artificial Sequence: Synthetic oligonucleotide
  Target: SCNA; (+) strand; PAM type: YTN; PAM sequence: TTC
aagctattaaacacagactg

SEQ ID NO: 79059 - DNA, 20 bp, Artificial Sequence
  Description of Artificial Sequence: Synthetic oligonucleotide
  Target: SCNA; (+) strand; PAM type: YTN; PAM sequence: CTA
ttaaacacagactgaaagca

SEQ ID NO: 79060 - DNA, 20 bp, Artificial Sequence
  Description of Artificial Sequence: Synthetic oligonucleotide
  Target: SCNA; (+) strand; PAM type: YTN; PAM sequence: TTA
aacacagactgaaagcattt

SEQ ID NO: 79061 - DNA, 20 bp, Artificial Sequence
  Description of Artificial Sequence: Synthetic oligonucleotide
  Target: SCNA; (+) strand; PAM type: YTN; PAM sequence: CTG
aaagcattttgaactcattt

SEQ ID NO: 79062 - DNA, 20 bp, Artificial Sequence
  Description of Artificial Sequence: Synthetic oligonucleotide
  Target: SCNA; (+) strand; PAM type: YTN; PAM sequence: TTT
tgaactcatttaattcaaca

SEQ ID NO: 79063 - DNA, 20 bp, Artificial Sequence
  Description of Artificial Sequence: Synthetic oligonucleotide
  Target: SCNA; (+) strand; PAM type: YTN; PAM sequence: TTT
gaactcatttaattcaacat

SEQ ID NO: 79064 - DNA, 20 bp, Artificial Sequence
  Description of Artificial Sequence: Synthetic oligonucleotide
  Target: SCNA; (+) strand; PAM type: YTN; PAM sequence: TTG
aactcatttaattcaacatt

SEQ ID NO: 79065 - DNA, 20 bp, Artificial Sequence
  Description of Artificial Sequence: Synthetic oligonucleotide
  Target: SCNA; (+) strand; PAM type: YTN; PAM sequence: CTC
atttaattcaacatttttat

SEQ ID NO: 79066 - DNA, 20 bp, Artificial Sequence
  Description of Artificial Sequence: Synthetic oligonucleotide
  Target: SCNA; (+) strand; PAM type: YTN; PAM sequence: TTT
aattcaacatttttatttca

SEQ ID NO: 79067 - DNA, 20 bp, Artificial Sequence
  Description of Artificial Sequence: Synthetic oligonucleotide
  Target: SCNA; (+) strand; PAM type: YTN; PAM sequence: TTA
attcaacatttttatttcac

SEQ ID NO: 79068 - DNA, 20 bp, Artificial Sequence
  Description of Artificial Sequence: Synthetic oligonucleotide
  Target: SCNA; (+) strand; PAM type: YTN; PAM sequence: TTC
aacatttttatttcacagat

SEQ ID NO: 79069 - DNA, 20 bp, Artificial Sequence
  Description of Artificial Sequence: Synthetic oligonucleotide
  Target: SCNA; (+) strand; PAM type: YTN; PAM sequence: TTT
ttatttcacagataagaaaa

SEQ ID NO: 79070 - DNA, 20 bp, Artificial Sequence
  Description of Artificial Sequence: Synthetic oligonucleotide
  Target: SCNA; (+) strand; PAM type: YTN; PAM sequence: TTT
tatttcacagataagaaaac

SEQ ID NO: 79071 - DNA, 20 bp, Artificial Sequence
  Description of Artificial Sequence: Synthetic oligonucleotide
  Target: SCNA; (+) strand; PAM type: YTN; PAM sequence: TTT
atttcacagataagaaaact

SEQ ID NO: 79072 - DNA, 20 bp, Artificial Sequence
  Description of Artificial Sequence: Synthetic oligonucleotide
  Target: SCNA; (+) strand; PAM type: YTN; PAM sequence: TTA
tttcacagataagaaaactc

SEQ ID NO: 79073 - DNA, 20 bp, Artificial Sequence
  Description of Artificial Sequence: Synthetic oligonucleotide
  Target: SCNA; (+) strand; PAM type: YTN; PAM sequence: TTT
cacagataagaaaactcatg

SEQ ID NO: 79074 - DNA, 20 bp, Artificial Sequence
  Description of Artificial Sequence: Synthetic oligonucleotide
  Target: SCNA; (+) strand; PAM type: YTN; PAM sequence: TTC
acagataagaaaactcatgc

SEQ ID NO: 79075 - DNA, 20 bp, Artificial Sequence
  Description of Artificial Sequence: Synthetic oligonucleotide
  Target: SCNA; (+) strand; PAM type: YTN; PAM sequence: CTC
atgcttagagaggggagatg

SEQ ID NO: 79076 - DNA, 20 bp, Artificial Sequence
  Description of Artificial Sequence: Synthetic oligonucleotide
  Target: SCNA; (+) strand; PAM type: YTN; PAM sequence: CTT
agagaggggagatgacatca

SEQ ID NO: 79077 - DNA, 20 bp, Artificial Sequence
  Description of Artificial Sequence: Synthetic oligonucleotide
  Target: SCNA; (+) strand; PAM type: YTN; PAM sequence: TTA
gagaggggagatgacatcat

SEQ ID NO: 79078 - DNA, 20 bp, Artificial Sequence
  Description of Artificial Sequence: Synthetic oligonucleotide
  Target: SCNA; (+) strand; PAM type: YTN; PAM sequence: CTC
tctgttccctgaattcaagc

SEQ ID NO: 79079 - DNA, 20 bp, Artificial Sequence
  Description of Artificial Sequence: Synthetic oligonucleotide
  Target: SCNA; (+) strand; PAM type: YTN; PAM sequence: CTC
tgttccctgaattcaagccc

SEQ ID NO: 79080 - DNA, 20 bp, Artificial Sequence
  Description of Artificial Sequence: Synthetic oligonucleotide
  Target: SCNA; (+) strand; PAM type: YTN; PAM sequence: CTG
ttccctgaattcaagcccat

SEQ ID NO: 79081 - DNA, 20 bp, Artificial Sequence
  Description of Artificial Sequence: Synthetic oligonucleotide
  Target: SCNA; (+) strand; PAM type: YTN; PAM sequence: TTC
cctgaattcaagcccatgcc

SEQ ID NO: 79082 - DNA, 20 bp, Artificial Sequence
  Description of Artificial Sequence: Synthetic oligonucleotide
  Target: SCNA; (+) strand; PAM type: YTN; PAM sequence: CTG
aattcaagcccatgccctcc

SEQ ID NO: 79083 - DNA, 20 bp, Artificial Sequence
  Description of Artificial Sequence: Synthetic oligonucleotide
  Target: SCNA; (+) strand; PAM type: YTN; PAM sequence: TTC
aagcccatgccctccacacc

SEQ ID NO: 79084 - DNA, 20 bp, Artificial Sequence
  Description of Artificial Sequence: Synthetic oligonucleotide
  Target: SCNA; (+) strand; PAM type: YTN; PAM sequence: CTC
cacaccatgccatgttttcc

SEQ ID NO: 79085 - DNA, 20 bp, Artificial Sequence
  Description of Artificial Sequence: Synthetic oligonucleotide
  Target: SCNA; (+) strand; PAM type: YTN; PAM sequence: TTT
tccctgtatatgaccaaaca

SEQ ID NO: 79086 - DNA, 20 bp, Artificial Sequence
  Description of Artificial Sequence: Synthetic oligonucleotide
  Target: SCNA; (+) strand; PAM type: YTN; PAM sequence: TTT
ccctgtatatgaccaaacaa

SEQ ID NO: 79087 - DNA, 20 bp, Artificial Sequence
  Description of Artificial Sequence: Synthetic oligonucleotide
  Target: SCNA; (+) strand; PAM type: YTN; PAM sequence: TTC
cctgtatatgaccaaacaaa

SEQ ID NO: 79088 - DNA, 20 bp, Artificial Sequence
  Description of Artificial Sequence: Synthetic oligonucleotide
  Target: SCNA; (+) strand; PAM type: YTN; PAM sequence: CTG
tatatgaccaaacaaaatgg

SEQ ID NO: 79089 - DNA, 20 bp, Artificial Sequence
  Description of Artificial Sequence: Synthetic oligonucleotide
  Target: SCNA; (+) strand; PAM type: YTN; PAM sequence: TTA
aaccacgagccgtcatgcac

SEQ ID NO: 79090 - DNA, 20 bp, Artificial Sequence
  Description of Artificial Sequence: Synthetic oligonucleotide
  Target: SCNA; (+) strand; PAM type: YTN; PAM sequence: CTG
gccatcatgctggatcaaac

SEQ ID NO: 79091 - DNA, 20 bp, Artificial Sequence
  Description of Artificial Sequence: Synthetic oligonucleotide
  Target: SCNA; (+) strand; PAM type: YTN; PAM sequence: CTG
gatcaaacagcagatataga

SEQ ID NO: 79092 - DNA, 20 bp, Artificial Sequence
  Description of Artificial Sequence: Synthetic oligonucleotide
  Target: SCNA; (+) strand; PAM type: YTN; PAM sequence: CTC
tagcagaacacttgtgaatt

SEQ ID NO: 79093 - DNA, 20 bp, Artificial Sequence
  Description of Artificial Sequence: Synthetic oligonucleotide
  Target: SCNA; (+) strand; PAM type: YTN; PAM sequence: CTA
gcagaacacttgtgaattgc

SEQ ID NO: 79094 - DNA, 20 bp, Artificial Sequence
  Description of Artificial Sequence: Synthetic oligonucleotide
  Target: SCNA; (+) strand; PAM type: YTN; PAM sequence: CTT
gtgaattgcctttgtttcaa

SEQ ID NO: 79095 - DNA, 20 bp, Artificial Sequence
  Description of Artificial Sequence: Synthetic oligonucleotide
  Target: SCNA; (+) strand; PAM type: YTN; PAM sequence: TTG
tgaattgcctttgtttcaaa

SEQ ID NO: 79096 - DNA, 20 bp, Artificial Sequence
  Description of Artificial Sequence: Synthetic oligonucleotide
  Target: SCNA; (+) strand; PAM type: YTN; PAM sequence: TTG
cctttgtttcaaactcataa

SEQ ID NO: 79097 - DNA, 20 bp, Artificial Sequence
  Description of Artificial Sequence: Synthetic oligonucleotide
  Target: SCNA; (+) strand; PAM type: YTN; PAM sequence: CTT
tgtttcaaactcataaatgt

SEQ ID NO: 79098 - DNA, 20 bp, Artificial Sequence
  Description of Artificial Sequence: Synthetic oligonucleotide
  Target: SCNA; (+) strand; PAM type: YTN; PAM sequence: TTT
gtttcaaactcataaatgtt

SEQ ID NO: 79099 - DNA, 20 bp, Artificial Sequence
  Description of Artificial Sequence: Synthetic oligonucleotide
  Target: SCNA; (+) strand; PAM type: YTN; PAM sequence: TTG
tttcaaactcataaatgtta

SEQ ID NO: 79100 - DNA, 20 bp, Artificial Sequence
  Description of Artificial Sequence: Synthetic oligonucleotide
  Target: SCNA; (+) strand; PAM type: YTN; PAM sequence: TTT
caaactcataaatgttagta

SEQ ID NO: 79101 - DNA, 20 bp, Artificial Sequence
  Description of Artificial Sequence: Synthetic oligonucleotide
  Target: SCNA; (+) strand; PAM type: YTN; PAM sequence: TTC
aaactcataaatgttagtat

SEQ ID NO: 79102 - DNA, 20 bp, Artificial Sequence
  Description of Artificial Sequence: Synthetic oligonucleotide
  Target: SCNA; (+) strand; PAM type: YTN; PAM sequence: CTC
ataaatgttagtataccttt

SEQ ID NO: 79103 - DNA, 20 bp, Artificial Sequence
  Description of Artificial Sequence: Synthetic oligonucleotide
  Target: SCNA; (+) strand; PAM type: YTN; PAM sequence: TTA
gtatacctttgtaggaggac

SEQ ID NO: 79104 - DNA, 20 bp, Artificial Sequence
  Description of Artificial Sequence: Synthetic oligonucleotide
  Target: SCNA; (+) strand; PAM type: YTN; PAM sequence: CTT
tgtaggaggactaccatgaa

SEQ ID NO: 79105 - DNA, 20 bp, Artificial Sequence
  Description of Artificial Sequence: Synthetic oligonucleotide
  Target: SCNA; (+) strand; PAM type: YTN; PAM sequence: TTT
gtaggaggactaccatgaaa

SEQ ID NO: 79106 - DNA, 20 bp, Artificial Sequence
  Description of Artificial Sequence: Synthetic oligonucleotide
  Target: SCNA; (+) strand; PAM type: YTN; PAM sequence: TTG
taggaggactaccatgaaag

SEQ ID NO: 79107 - DNA, 20 bp, Artificial Sequence
  Description of Artificial Sequence: Synthetic oligonucleotide
  Target: SCNA; (+) strand; PAM type: YTN; PAM sequence: CTA
ccatgaaagatgaattgcca

SEQ ID NO: 79108 - DNA, 20 bp, Artificial Sequence
  Description of Artificial Sequence: Synthetic oligonucleotide
  Target: SCNA; (+) strand; PAM type: YTN; PAM sequence: TTG
ccactataagcagtcattag

SEQ ID NO: 79109 - DNA, 20 bp, Artificial Sequence
  Description of Artificial Sequence: Synthetic oligonucleotide
  Target: SCNA; (+) strand; PAM type: YTN; PAM sequence: CTA
taagcagtcattagtattta

SEQ ID NO: 79110 - DNA, 20 bp, Artificial Sequence
  Description of Artificial Sequence: Synthetic oligonucleotide
  Target: SCNA; (+) strand; PAM type: YTN; PAM sequence: TTA
gtatttagtggagattaact

SEQ ID NO: 79111 - DNA, 20 bp, Artificial Sequence
  Description of Artificial Sequence: Synthetic oligonucleotide
  Target: SCNA; (+) strand; PAM type: YTN; PAM sequence: TTT
agtggagattaacttttaaa

SEQ ID NO: 79112 - DNA, 20 bp, Artificial Sequence
  Description of Artificial Sequence: Synthetic oligonucleotide
  Target: SCNA; (+) strand; PAM type: YTN; PAM sequence: TTA
gtggagattaacttttaaag

SEQ ID NO: 79113 - DNA, 20 bp, Artificial Sequence
  Description of Artificial Sequence: Synthetic oligonucleotide
  Target: SCNA; (+) strand; PAM type: YTN; PAM sequence: TTA
acttttaaaggtgcctactt

SEQ ID NO: 79114 - DNA, 20 bp, Artificial Sequence
  Description of Artificial Sequence: Synthetic oligonucleotide
  Target: SCNA; (+) strand; PAM type: YTN; PAM sequence: CTT
ttaaaggtgcctactttaga

SEQ ID NO: 79115 - DNA, 20 bp, Artificial Sequence
  Description of Artificial Sequence: Synthetic oligonucleotide
  Target: SCNA; (+) strand; PAM type: YTN; PAM sequence: TTT
taaaggtgcctactttagat

SEQ ID NO: 79116 - DNA, 20 bp, Artificial Sequence
  Description of Artificial Sequence: Synthetic oligonucleotide
  Target: SCNA; (+) strand; PAM type: YTN; PAM sequence: TTT
aaaggtgcctactttagata

SEQ ID NO: 79117 - DNA, 20 bp, Artificial Sequence
  Description of Artificial Sequence: Synthetic oligonucleotide
  Target: SCNA; (+) strand; PAM type: YTN; PAM sequence: TTA
aaggtgcctactttagatat

SEQ ID NO: 79118 - DNA, 20 bp, Artificial Sequence
  Description of Artificial Sequence: Synthetic oligonucleotide
  Target: SCNA; (+) strand; PAM type: YTN; PAM sequence: CTA
ctttagatatgtcataatat

SEQ ID NO: 79119 - DNA, 20 bp, Artificial Sequence
  Description of Artificial Sequence: Synthetic oligonucleotide
  Target: SCNA; (+) strand; PAM type: YTN; PAM sequence: CTT
tagatatgtcataatattag

SEQ ID NO: 79120 - DNA, 20 bp, Artificial Sequence
  Description of Artificial Sequence: Synthetic oligonucleotide
  Target: SCNA; (+) strand; PAM type: YTN; PAM sequence: TTT
agatatgtcataatattaga

SEQ ID NO: 79121 - DNA, 20 bp, Artificial Sequence
  Description of Artificial Sequence: Synthetic oligonucleotide
  Target: SCNA; (+) strand; PAM type: YTN; PAM sequence: TTA
gatatgtcataatattagaa

SEQ ID NO: 79122 - DNA, 20 bp, Artificial Sequence
  Description of Artificial Sequence: Synthetic oligonucleotide
  Target: SCNA; (+) strand; PAM type: YTN; PAM sequence: TTA
gaaattaaggatgaagtatt

SEQ ID NO: 79123 - DNA, 20 bp, Artificial Sequence
  Description of Artificial Sequence: Synthetic oligonucleotide
  Target: SCNA; (+) strand; PAM type: YTN; PAM sequence: TTA
aggatgaagtatttctatct

SEQ ID NO: 79124 - DNA, 20 bp, Artificial Sequence
  Description of Artificial Sequence: Synthetic oligonucleotide
  Target: SCNA; (+) strand; PAM type: YTN; PAM sequence: TTT
ctatctatctatgctttgta

SEQ ID NO: 79125 - DNA, 20 bp, Artificial Sequence
  Description of Artificial Sequence: Synthetic oligonucleotide
  Target: SCNA; (+) strand; PAM type: YTN; PAM sequence: TTC
tatctatctatgctttgtag

SEQ ID NO: 79126 - DNA, 20 bp, Artificial Sequence
  Description of Artificial Sequence: Synthetic oligonucleotide
  Target: SCNA; (+) strand; PAM type: YTN; PAM sequence: CTA
tctatctatgctttgtagga

SEQ ID NO: 79127 - DNA, 20 bp, Artificial Sequence
  Description of Artificial Sequence: Synthetic oligonucleotide
  Target: SCNA; (+) strand; PAM type: YTN; PAM sequence: CTA
tctatgctttgtaggacaat

SEQ ID NO: 79128 - DNA, 20 bp, Artificial Sequence
  Description of Artificial Sequence: Synthetic oligonucleotide
  Target: SCNA; (+) strand; PAM type: YTN; PAM sequence: CTA
tgctttgtaggacaattata

SEQ ID NO: 79129 - DNA, 20 bp, Artificial Sequence
  Description of Artificial Sequence: Synthetic oligonucleotide
  Target: SCNA; (+) strand; PAM type: YTN; PAM sequence: CTT
tgtaggacaattatattaat

SEQ ID NO: 79130 - DNA, 20 bp, Artificial Sequence
  Description of Artificial Sequence: Synthetic oligonucleotide
  Target: SCNA; (+) strand; PAM type: YTN; PAM sequence: TTT
gtaggacaattatattaatc

SEQ ID NO: 79131 - DNA, 20 bp, Artificial Sequence
  Description of Artificial Sequence: Synthetic oligonucleotide
  Target: SCNA; (+) strand; PAM type: YTN; PAM sequence: TTG
taggacaattatattaatcc

SEQ ID NO: 79132 - DNA, 20 bp, Artificial Sequence
  Description of Artificial Sequence: Synthetic oligonucleotide
  Target: SCNA; (+) strand; PAM type: YTN; PAM sequence: TTA
tattaatcccaaagttacct

SEQ ID NO: 79133 - DNA, 20 bp, Artificial Sequence
  Description of Artificial Sequence: Synthetic oligonucleotide
  Target: SCNA; (+) strand; PAM type: YTN; PAM sequence: TTA
atcccaaagttacctgacat

SEQ ID NO: 79134 - DNA, 20 bp, Artificial Sequence
  Description of Artificial Sequence: Synthetic oligonucleotide
  Target: SCNA; (+) strand; PAM type: YTN; PAM sequence: TTA
cctgacataagtaggaagca

SEQ ID NO: 79135 - DNA, 20 bp, Artificial Sequence
  Description of Artificial Sequence: Synthetic oligonucleotide
  Target: SCNA; (+) strand; PAM type: YTN; PAM sequence: CTG
acataagtaggaagcacatg

SEQ ID NO: 79136 - DNA, 20 bp, Artificial Sequence
  Description of Artificial Sequence: Synthetic oligonucleotide
  Target: SCNA; (+) strand; PAM type: YTN; PAM sequence: CTC
ttctgatatatagcaaataa

SEQ ID NO: 79137 - DNA, 20 bp, Artificial Sequence
  Description of Artificial Sequence: Synthetic oligonucleotide
  Target: SCNA; (+) strand; PAM type: YTN; PAM sequence: CTT
ctgatatatagcaaataata

SEQ ID NO: 79138 - DNA, 20 bp, Artificial Sequence
  Description of Artificial Sequence: Synthetic oligonucleotide
  Target: SCNA; (+) strand; PAM type: YTN; PAM sequence: TTC
tgatatatagcaaataatat

SEQ ID NO: 79139 - DNA, 20 bp, Artificial Sequence
  Description of Artificial Sequence: Synthetic oligonucleotide
  Target: SCNA; (+) strand; PAM type: YTN; PAM sequence: CTG
atatatagcaaataatatat

SEQ ID NO: 79140 - DNA, 20 bp, Artificial Sequence
  Description of Artificial Sequence: Synthetic oligonucleotide
  Target: SCNA; (+) strand; PAM type: YTN; PAM sequence: CTC
aatccactgagcaaaaattg

SEQ ID NO: 79141 - DNA, 20 bp, Artificial Sequence
  Description of Artificial Sequence: Synthetic oligonucleotide
  Target: SCNA; (+) strand; PAM type: YTN; PAM sequence: CTG
agcaaaaattggaacctcaa

SEQ ID NO: 79142 - DNA, 20 bp, Artificial Sequence
  Description of Artificial Sequence: Synthetic oligonucleotide
  Target: SCNA; (+) strand; PAM type: YTN; PAM sequence: TTG
gaacctcaaggcaaagctgt

SEQ ID NO: 79143 - DNA, 20 bp, Artificial Sequence
  Description of Artificial Sequence: Synthetic oligonucleotide
  Target: SCNA; (+) strand; PAM type: YTN; PAM sequence: CTC
aaggcaaagctgtatgtaca

SEQ ID NO: 79144 - DNA, 20 bp, Artificial Sequence
  Description of Artificial Sequence: Synthetic oligonucleotide
  Target: SCNA; (+) strand; PAM type: YTN; PAM sequence: CTG
tatgtacaacctcagaaaat

SEQ ID NO: 79145 - DNA, 20 bp, Artificial Sequence
  Description of Artificial Sequence: Synthetic oligonucleotide
  Target: SCNA; (+) strand; PAM type: YTN; PAM sequence: CTC
agaaaatctgtgtggcatga

SEQ ID NO: 79146 - DNA, 20 bp, Artificial Sequence
  Description of Artificial Sequence: Synthetic oligonucleotide
  Target: SCNA; (+) strand; PAM type: YTN; PAM sequence: CTG
tgtggcatgaaataccgtaa

SEQ ID NO: 79147 - DNA, 20 bp, Artificial Sequence
  Description of Artificial Sequence: Synthetic oligonucleotide
  Target: SCNA; (+) strand; PAM type: YTN; PAM sequence: CTG
aaagggcaattttcgatttt

SEQ ID NO: 79148 - DNA, 20 bp, Artificial Sequence
  Description of Artificial Sequence: Synthetic oligonucleotide
  Target: SCNA; (+) strand; PAM type: YTN; PAM sequence: TTT
tcgatttttgtgaggattcc

SEQ ID NO: 79149 - DNA, 20 bp, Artificial Sequence
  Description of Artificial Sequence: Synthetic oligonucleotide
  Target: SCNA; (+) strand; PAM type: YTN; PAM sequence: TTT
cgatttttgtgaggattccc

SEQ ID NO: 79150 - DNA, 20 bp, Artificial Sequence
  Description of Artificial Sequence: Synthetic oligonucleotide
  Target: SCNA; (+) strand; PAM type: YTN; PAM sequence: TTC
gatttttgtgaggattccca

SEQ ID NO: 79151 - DNA, 20 bp, Artificial Sequence
  Description of Artificial Sequence: Synthetic oligonucleotide
  Target: SCNA; (+) strand; PAM type: YTN; PAM sequence: TTT
ttgtgaggattcccaatagc

SEQ ID NO: 79152 - DNA, 20 bp, Artificial Sequence
  Description of Artificial Sequence: Synthetic oligonucleotide
  Target: SCNA; (+) strand; PAM type: YTN; PAM sequence: TTT
tgtgaggattcccaatagcc

SEQ ID NO: 79153 - DNA, 20 bp, Artificial Sequence
  Description of Artificial Sequence: Synthetic oligonucleotide
  Target: SCNA; (+) strand; PAM type: YTN; PAM sequence: TTT
gtgaggattcccaatagcca

SEQ ID NO: 79154 - DNA, 20 bp, Artificial Sequence
  Description of Artificial Sequence: Synthetic oligonucleotide
  Target: SCNA; (+) strand; PAM type: YTN; PAM sequence: TTG
tgaggattcccaatagccaa

SEQ ID NO: 79155 - DNA, 20 bp, Artificial Sequence
  Description of Artificial Sequence: Synthetic oligonucleotide
  Target: SCNA; (+) strand; PAM type: YTN; PAM sequence: TTC
ccaatagccaaatagaaaaa

SEQ ID NO: 79156 - DNA, 20 bp, Artificial Sequence
  Description of Artificial Sequence: Synthetic oligonucleotide
  Target: SCNA; (+) strand; PAM type: YTN; PAM sequence: TTG
gagatgacttgatattaagg

SEQ ID NO: 79157 - DNA, 20 bp, Artificial Sequence
  Description of Artificial Sequence: Synthetic oligonucleotide
  Target: SCNA; (+) strand; PAM type: YTN; PAM sequence: CTT
gatattaaggattgtcagac

SEQ ID NO: 79158 - DNA, 20 bp, Artificial Sequence
  Description of Artificial Sequence: Synthetic oligonucleotide
  Target: SCNA; (+) strand; PAM type: YTN; PAM sequence: TTG
atattaaggattgtcagact

SEQ ID NO: 79159 - DNA, 20 bp, Artificial Sequence
  Description of Artificial Sequence: Synthetic oligonucleotide
  Target: SCNA; (+) strand; PAM type: YTN; PAM sequence: TTA
aggattgtcagacttatgtc

SEQ ID NO: 79160 - DNA, 20 bp, Artificial Sequence
  Description of Artificial Sequence: Synthetic oligonucleotide
  Target: SCNA; (+) strand; PAM type: YTN; PAM sequence: TTG
tcagacttatgtcaccccat

SEQ ID NO: 79161 - DNA, 20 bp, Artificial Sequence
  Description of Artificial Sequence: Synthetic oligonucleotide
  Target: SCNA; (+) strand; PAM type: YTN; PAM sequence: CTT
atgtcaccccattgtaagca

SEQ ID NO: 79162 - DNA, 20 bp, Artificial Sequence
  Description of Artificial Sequence: Synthetic oligonucleotide
  Target: SCNA; (+) strand; PAM type: YTN; PAM sequence: TTA
tgtcaccccattgtaagcat

SEQ ID NO: 79163 - DNA, 20 bp, Artificial Sequence
  Description of Artificial Sequence: Synthetic oligonucleotide
  Target: SCNA; (+) strand; PAM type: YTN; PAM sequence: TTG
taagcatagatagttaaaat

SEQ ID NO: 79164 - DNA, 20 bp, Artificial Sequence
  Description of Artificial Sequence: Synthetic oligonucleotide
  Target: SCNA; (+) strand; PAM type: YTN; PAM sequence: TTA
aaatctatttgatttcatta

SEQ ID NO: 79165 - DNA, 20 bp, Artificial Sequence
  Description of Artificial Sequence: Synthetic oligonucleotide
  Target: SCNA; (+) strand; PAM type: YTN; PAM sequence: CTA
tttgatttcattaaattaaa

SEQ ID NO: 79166 - DNA, 20 bp, Artificial Sequence
  Description of Artificial Sequence: Synthetic oligonucleotide
  Target: SCNA; (+) strand; PAM type: YTN; PAM sequence: TTT
gatttcattaaattaaaagt

SEQ ID NO: 79167 - DNA, 20 bp, Artificial Sequence
  Description of Artificial Sequence: Synthetic oligonucleotide
  Target: SCNA; (+) strand; PAM type: YTN; PAM sequence: TTG
atttcattaaattaaaagtg

SEQ ID NO: 79168 - DNA, 20 bp, Artificial Sequence
  Description of Artificial Sequence: Synthetic oligonucleotide
  Target: SCNA; (+) strand; PAM type: YTN; PAM sequence: TTT
cattaaattaaaagtgtaca

SEQ ID NO: 79169 - DNA, 20 bp, Artificial Sequence
  Description of Artificial Sequence: Synthetic oligonucleotide
  Target: SCNA; (+) strand; PAM type: YTN; PAM sequence: TTC
attaaattaaaagtgtacat

SEQ ID NO: 79170 - DNA, 20 bp, Artificial Sequence
  Description of Artificial Sequence: Synthetic oligonucleotide
  Target: SCNA; (+) strand; PAM type: YTN; PAM sequence: TTA
aattaaaagtgtacattatt

SEQ ID NO: 79171 - DNA, 20 bp, Artificial Sequence
  Description of Artificial Sequence: Synthetic oligonucleotide
  Target: SCNA; (+) strand; PAM type: YTN; PAM sequence: TTA
aaagtgtacattattcatca

SEQ ID NO: 79172 - DNA, 20 bp, Artificial Sequence
  Description of Artificial Sequence: Synthetic oligonucleotide
  Target: SCNA; (+) strand; PAM type: YTN; PAM sequence: TTA
ttcatcacaatccataatgt

SEQ ID NO: 79173 - DNA, 20 bp, Artificial Sequence
  Description of Artificial Sequence: Synthetic oligonucleotide
  Target: SCNA; (+) strand; PAM type: YTN; PAM sequence: TTC
atcacaatccataatgtaac

SEQ ID NO: 79174 - DNA, 20 bp, Artificial Sequence
  Description of Artificial Sequence: Synthetic oligonucleotide
  Target: SCNA; (+) strand; PAM type: YTN; PAM sequence: CTG
aattcattcctatgaactga

SEQ ID NO: 79175 - DNA, 20 bp, Artificial Sequence
  Description of Artificial Sequence: Synthetic oligonucleotide
  Target: SCNA; (+) strand; PAM type: YTN; PAM sequence: TTC
attcctatgaactgaattcc

SEQ ID NO: 79176 - DNA, 20 bp, Artificial Sequence
  Description of Artificial Sequence: Synthetic oligonucleotide
  Target: SCNA; (+) strand; PAM type: YTN; PAM sequence: TTC
ctatgaactgaattccaatt

SEQ ID NO: 79177 - DNA, 20 bp, Artificial Sequence
  Description of Artificial Sequence: Synthetic oligonucleotide
  Target: SCNA; (+) strand; PAM type: YTN; PAM sequence: CTA
tgaactgaattccaattaga

SEQ ID NO: 79178 - DNA, 20 bp, Artificial Sequence
  Description of Artificial Sequence: Synthetic oligonucleotide
  Target: SCNA; (+) strand; PAM type: YTN; PAM sequence: CTG
aattccaattagatttatca

SEQ ID NO: 79179 - DNA, 20 bp, Artificial Sequence
  Description of Artificial Sequence: Synthetic oligonucleotide
  Target: SCNA; (+) strand; PAM type: YTN; PAM sequence: TTC
caattagatttatcatattg

SEQ ID NO: 79180 - DNA, 20 bp, Artificial Sequence
  Description of Artificial Sequence: Synthetic oligonucleotide
  Target: SCNA; (+) strand; PAM type: YTN; PAM sequence: TTA
gatttatcatattgttgttg

SEQ ID NO: 79181 - DNA, 20 bp, Artificial Sequence
  Description of Artificial Sequence: Synthetic oligonucleotide
  Target: SCNA; (+) strand; PAM type: YTN; PAM sequence: TTT
atcatattgttgttgtgaac

SEQ ID NO: 79182 - DNA, 20 bp, Artificial Sequence
  Description of Artificial Sequence: Synthetic oligonucleotide
  Target: SCNA; (+) strand; PAM type: YTN; PAM sequence: TTA
tcatattgttgttgtgaaca

SEQ ID NO: 79183 - DNA, 20 bp, Artificial Sequence
  Description of Artificial Sequence: Synthetic oligonucleotide
  Target: SCNA; (+) strand; PAM type: YTN; PAM sequence: TTG
ttgttgtgaacaccagagaa

SEQ ID NO: 79184 - DNA, 20 bp, Artificial Sequence
  Description of Artificial Sequence: Synthetic oligonucleotide
  Target: SCNA; (+) strand; PAM type: YTN; PAM sequence: TTG
ttgtgaacaccagagaaaag

SEQ ID NO: 79185 - DNA, 20 bp, Artificial Sequence
  Description of Artificial Sequence: Synthetic oligonucleotide
  Target: SCNA; (+) strand; PAM type: YTN; PAM sequence: TTG
tgaacaccagagaaaagtag

SEQ ID NO: 79186 - DNA, 20 bp, Artificial Sequence
  Description of Artificial Sequence: Synthetic oligonucleotide
  Target: SCNA; (+) strand; PAM type: YTN; PAM sequence: CTA
agcaggaagataaaatatat

SEQ ID NO: 79187 - DNA, 20 bp, Artificial Sequence
  Description of Artificial Sequence: Synthetic oligonucleotide
  Target: SCNA; (+) strand; PAM type: YTN; PAM sequence: TTC
tttatttccattttttcact

SEQ ID NO: 79188 - DNA, 20 bp, Artificial Sequence
  Description of Artificial Sequence: Synthetic oligonucleotide
  Target: SCNA; (+) strand; PAM type: YTN; PAM sequence: CTT
tatttccattttttcactta

SEQ ID NO: 79189 - DNA, 20 bp, Artificial Sequence
  Description of Artificial Sequence: Synthetic oligonucleotide
  Target: SCNA; (+) strand; PAM type: YTN; PAM sequence: TTT
atttccattttttcacttac

SEQ ID NO: 79190 - DNA, 20 bp, Artificial Sequence
  Description of Artificial Sequence: Synthetic oligonucleotide
  Target: SCNA; (+) strand; PAM type: YTN; PAM sequence: TTA
tttccattttttcacttact

SEQ ID NO: 79191 - DNA, 20 bp, Artificial Sequence
  Description of Artificial Sequence: Synthetic oligonucleotide
  Target: SCNA; (+) strand; PAM type: YTN; PAM sequence: TTT
ccattttttcacttacttgt

SEQ ID NO: 79192 - DNA, 20 bp, Artificial Sequence
  Description of Artificial Sequence: Synthetic oligonucleotide
  Target: SCNA; (+) strand; PAM type: YTN; PAM sequence: TTC
cattttttcacttacttgtt

SEQ ID NO: 79193 - DNA, 20 bp, Artificial Sequence
  Description of Artificial Sequence: Synthetic oligonucleotide
  Target: SCNA; (+) strand; PAM type: YTN; PAM sequence: TTT
tttcacttacttgttcaata

SEQ ID NO: 79194 - DNA, 20 bp, Artificial Sequence
  Description of Artificial Sequence: Synthetic oligonucleotide
  Target: SCNA; (+) strand; PAM type: YTN; PAM sequence: TTT
ttcacttacttgttcaataa

SEQ ID NO: 79195 - DNA, 20 bp, Artificial Sequence
  Description of Artificial Sequence: Synthetic oligonucleotide
  Target: SCNA; (+) strand; PAM type: YTN; PAM sequence: TTT
tcacttacttgttcaataaa

SEQ ID NO: 79196 - DNA, 20 bp, Artificial Sequence
  Description of Artificial Sequence: Synthetic oligonucleotide
  Target: SCNA; (+) strand; PAM type: YTN; PAM sequence: TTT
cacttacttgttcaataaat

SEQ ID NO: 79197 - DNA, 20 bp, Artificial Sequence
  Description of Artificial Sequence: Synthetic oligonucleotide
  Target: SCNA; (+) strand; PAM type: YTN; PAM sequence: TTC
acttacttgttcaataaata

SEQ ID NO: 79198 - DNA, 20 bp, Artificial Sequence
  Description of Artificial Sequence: Synthetic oligonucleotide
  Target: SCNA; (+) strand; PAM type: YTN; PAM sequence: CTT
acttgttcaataaataatct

SEQ ID NO: 79199 - DNA, 20 bp, Artificial Sequence
  Description of Artificial Sequence: Synthetic oligonucleotide
  Target: SCNA; (+) strand; PAM type: YTN; PAM sequence: TTA
cttgttcaataaataatcta

SEQ ID NO: 79200 - DNA, 20 bp, Artificial Sequence
  Description of Artificial Sequence: Synthetic oligonucleotide
  Target: SCNA; (+) strand; PAM type: YTN; PAM sequence: CTT
gttcaataaataatctattt

SEQ ID NO: 79201 - DNA, 20 bp, Artificial Sequence
  Description of Artificial Sequence: Synthetic oligonucleotide
  Target: SCNA; (+) strand; PAM type: YTN; PAM sequence: TTG
ttcaataaataatctattta

SEQ ID NO: 79202 - DNA, 20 bp, Artificial Sequence
  Description of Artificial Sequence: Synthetic oligonucleotide
  Target: SCNA; (+) strand; PAM type: YTN; PAM sequence: TTC
aataaataatctatttattc

SEQ ID NO: 79203 - DNA, 20 bp, Artificial Sequence
  Description of Artificial Sequence: Synthetic oligonucleotide
  Target: SCNA; (+) strand; PAM type: YTN; PAM sequence: CTA
tttattcaacaagcataatt

SEQ ID NO: 79204 - DNA, 20 bp, Artificial Sequence
  Description of Artificial Sequence: Synthetic oligonucleotide
  Target: SCNA; (+) strand; PAM type: YTN; PAM sequence: TTT
attcaacaagcataatttct

SEQ ID NO: 79205 - DNA, 20 bp, Artificial Sequence
  Description of Artificial Sequence: Synthetic oligonucleotide
  Target: SCNA; (+) strand; PAM type: YTN; PAM sequence: TTA
ttcaacaagcataatttctg

SEQ ID NO: 79206 - DNA, 20 bp, Artificial Sequence
  Description of Artificial Sequence: Synthetic oligonucleotide
  Target: SCNA; (+) strand; PAM type: YTN; PAM sequence: TTC
aacaagcataatttctggct

SEQ ID NO: 79207 - DNA, 20 bp, Artificial Sequence
  Description of Artificial Sequence: Synthetic oligonucleotide
  Target: SCNA; (+) strand; PAM type: YTN; PAM sequence: TTT
ctggctcagtattctttgca

SEQ ID NO: 79208 - DNA, 20 bp, Artificial Sequence
  Description of Artificial Sequence: Synthetic oligonucleotide
  Target: SCNA; (+) strand; PAM type: YTN; PAM sequence: TTC
tggctcagtattctttgcat

SEQ ID NO: 79209 - DNA, 20 bp, Artificial Sequence
  Description of Artificial Sequence: Synthetic oligonucleotide
  Target: SCNA; (+) strand; PAM type: YTN; PAM sequence: CTG
gctcagtattctttgcatta

SEQ ID NO: 79210 - DNA, 20 bp, Artificial Sequence
  Description of Artificial Sequence: Synthetic oligonucleotide
  Target: SCNA; (+) strand; PAM type: YTN; PAM sequence: CTC
agtattctttgcattagtat

SEQ ID NO: 79211 - DNA, 20 bp, Artificial Sequence
  Description of Artificial Sequence: Synthetic oligonucleotide
  Target: SCNA; (+) strand; PAM type: YTN; PAM sequence: TTC
tttgcattagtattcactat

SEQ ID NO: 79212 - DNA, 20 bp, Artificial Sequence
  Description of Artificial Sequence: Synthetic oligonucleotide
  Target: SCNA; (+) strand; PAM type: YTN; PAM sequence: CTT
tgcattagtattcactatga

SEQ ID NO: 79213 - DNA, 20 bp, Artificial Sequence
  Description of Artificial Sequence: Synthetic oligonucleotide
  Target: SCNA; (+) strand; PAM type: YTN; PAM sequence: TTT
gcattagtattcactatgac

SEQ ID NO: 79214 - DNA, 20 bp, Artificial Sequence
  Description of Artificial Sequence: Synthetic oligonucleotide
  Target: SCNA; (+) strand; PAM type: YTN; PAM sequence: TTG
cattagtattcactatgaca

SEQ ID NO: 79215 - DNA, 20 bp, Artificial Sequence
  Description of Artificial Sequence: Synthetic oligonucleotide
  Target: SCNA; (+) strand; PAM type: YTN; PAM sequence: TTA
gtattcactatgacattaat

SEQ ID NO: 79216 - DNA, 20 bp, Artificial Sequence
  Description of Artificial Sequence: Synthetic oligonucleotide
  Target: SCNA; (+) strand; PAM type: YTN; PAM sequence: TTC
actatgacattaataagaat

SEQ ID NO: 79217 - DNA, 20 bp, Artificial Sequence
  Description of Artificial Sequence: Synthetic oligonucleotide
  Target: SCNA; (+) strand; PAM type: YTN; PAM sequence: CTA
tgacattaataagaattaaa

SEQ ID NO: 79218 - DNA, 20 bp, Artificial Sequence
  Description of Artificial Sequence: Synthetic oligonucleotide
  Target: SCNA; (+) strand; PAM type: YTN; PAM sequence: TTA
ataagaattaaatgctactt

SEQ ID NO: 79219 - DNA, 20 bp, Artificial Sequence
  Description of Artificial Sequence: Synthetic oligonucleotide
  Target: SCNA; (+) strand; PAM type: YTN; PAM sequence: TTA
aatgctactttggaattttc

SEQ ID NO: 79220 - DNA, 20 bp, Artificial Sequence
  Description of Artificial Sequence: Synthetic oligonucleotide
  Target: SCNA; (+) strand; PAM type: YTN; PAM sequence: CTA
ctttggaattttcacaagta

SEQ ID NO: 79221 - DNA, 20 bp, Artificial Sequence
  Description of Artificial Sequence: Synthetic oligonucleotide
  Target: SCNA; (+) strand; PAM type: YTN; PAM sequence: CTT
tggaattttcacaagtaact

SEQ ID NO: 79222 - DNA, 20 bp, Artificial Sequence
  Description of Artificial Sequence: Synthetic oligonucleotide
  Target: SCNA; (+) strand; PAM type: YTN; PAM sequence: TTT
ggaattttcacaagtaactg

SEQ ID NO: 79223 - DNA, 20 bp, Artificial Sequence
  Description of Artificial Sequence: Synthetic oligonucleotide
  Target: SCNA; (+) strand; PAM type: YTN; PAM sequence: TTG
gaattttcacaagtaactgc

SEQ ID NO: 79224 - DNA, 20 bp, Artificial Sequence
  Description of Artificial Sequence: Synthetic oligonucleotide
  Target: SCNA; (+) strand; PAM type: YTN; PAM sequence: TTT
tcacaagtaactgcttagtg

SEQ ID NO: 79225 - DNA, 20 bp, Artificial Sequence
  Description of Artificial Sequence: Synthetic oligonucleotide
  Target: SCNA; (+) strand; PAM type: YTN; PAM sequence: TTT
cacaagtaactgcttagtga

SEQ ID NO: 79226 - DNA, 20 bp, Artificial Sequence
  Description of Artificial Sequence: Synthetic oligonucleotide
  Target: SCNA; (+) strand; PAM type: YTN; PAM sequence: TTC
acaagtaactgcttagtgat

SEQ ID NO: 79227 - DNA, 20 bp, Artificial Sequence
  Description of Artificial Sequence: Synthetic oligonucleotide
  Target: SCNA; (+) strand; PAM type: YTN; PAM sequence: CTG
cttagtgattccagaatcac

SEQ ID NO: 79228 - DNA, 20 bp, Artificial Sequence
  Description of Artificial Sequence: Synthetic oligonucleotide
  Target: SCNA; (+) strand; PAM type: YTN; PAM sequence: CTT
agtgattccagaatcacctg

SEQ ID NO: 79229 - DNA, 20 bp, Artificial Sequence
  Description of Artificial Sequence: Synthetic oligonucleotide
  Target: SCNA; (+) strand; PAM type: YTN; PAM sequence: TTA
gtgattccagaatcacctgg

SEQ ID NO: 79230 - DNA, 20 bp, Artificial Sequence
  Description of Artificial Sequence: Synthetic oligonucleotide
  Target: SCNA; (+) strand; PAM type: YTN; PAM sequence: TTC
cagaatcacctggtagaagg

SEQ ID NO: 79231 - DNA, 20 bp, Artificial Sequence
  Description of Artificial Sequence: Synthetic oligonucleotide
  Target: SCNA; (+) strand; PAM type: YTN; PAM sequence: CTG
gtagaaggggatatttaaat

SEQ ID NO: 79232 - DNA, 20 bp, Artificial Sequence
  Description of Artificial Sequence: Synthetic oligonucleotide
  Target: SCNA; (+) strand; PAM type: YTN; PAM sequence: TTT
aaattgcaacttaaaaatcc

SEQ ID NO: 79233 - DNA, 20 bp, Artificial Sequence
  Description of Artificial Sequence: Synthetic oligonucleotide
  Target: SCNA; (+) strand; PAM type: YTN; PAM sequence: TTA
aattgcaacttaaaaatcca

SEQ ID NO: 79234 - DNA, 20 bp, Artificial Sequence
  Description of Artificial Sequence: Synthetic oligonucleotide
  Target: SCNA; (+) strand; PAM type: YTN; PAM sequence: TTG
caacttaaaaatccaaatgt

SEQ ID NO: 79235 - DNA, 20 bp, Artificial Sequence
  Description of Artificial Sequence: Synthetic oligonucleotide
  Target: SCNA; (+) strand; PAM type: YTN; PAM sequence: CTT
aaaaatccaaatgttgttaa

SEQ ID NO: 79236 - DNA, 20 bp, Artificial Sequence
  Description of Artificial Sequence: Synthetic oligonucleotide
  Target: SCNA; (+) strand; PAM type: YTN; PAM sequence: TTA
aaaatccaaatgttgttaaa

SEQ ID NO: 79237 - DNA, 20 bp, Artificial Sequence
  Description of Artificial Sequence: Synthetic oligonucleotide
  Target: SCNA; (+) strand; PAM type: YTN; PAM sequence: TTG
ttaaaagttttaataaaatt

SEQ ID NO: 79238 - DNA, 20 bp, Artificial Sequence
  Description of Artificial Sequence: Synthetic oligonucleotide
  Target: SCNA; (+) strand; PAM type: YTN; PAM sequence: TTA
aaagttttaataaaatttct

SEQ ID NO: 79239 - DNA, 20 bp, Artificial Sequence
  Description of Artificial Sequence: Synthetic oligonucleotide
  Target: SCNA; (+) strand; PAM type: YTN; PAM sequence: TTT
taataaaatttcttataaaa

SEQ ID NO: 79240 - DNA, 20 bp, Artificial Sequence
  Description of Artificial Sequence: Synthetic oligonucleotide
  Target: SCNA; (+) strand; PAM type: YTN; PAM sequence: TTT
aataaaatttcttataaaaa

SEQ ID NO: 79241 - DNA, 20 bp, Artificial Sequence
  Description of Artificial Sequence: Synthetic oligonucleotide
  Target: SCNA; (+) strand; PAM type: YTN; PAM sequence: TTA
ataaaatttcttataaaaat

SEQ ID NO: 79242 - DNA, 20 bp, Artificial Sequence
  Description of Artificial Sequence: Synthetic oligonucleotide
  Target: SCNA; (+) strand; PAM type: YTN; PAM sequence: TTT
cttataaaaattacttcata

SEQ ID NO: 79243 - DNA, 20 bp, Artificial Sequence
  Description of Artificial Sequence: Synthetic oligonucleotide
  Target: SCNA; (+) strand; PAM type: YTN; PAM sequence: TTC
ttataaaaattacttcatat

SEQ ID NO: 79244 - DNA, 20 bp, Artificial Sequence
  Description of Artificial Sequence: Synthetic oligonucleotide
  Target: SCNA; (+) strand; PAM type: YTN; PAM sequence: CTT
ataaaaattacttcatatac

SEQ ID NO: 79245 - DNA, 20 bp, Artificial Sequence
  Description of Artificial Sequence: Synthetic oligonucleotide
  Target: SCNA; (+) strand; PAM type: YTN; PAM sequence: TTA
taaaaattacttcatatacg

SEQ ID NO: 79246 - DNA, 20 bp, Artificial Sequence
  Description of Artificial Sequence: Synthetic oligonucleotide
  Target: SCNA; (+) strand; PAM type: YTN; PAM sequence: TTA
cttcatatacgagttgacaa

SEQ ID NO: 79247 - DNA, 20 bp, Artificial Sequence
  Description of Artificial Sequence: Synthetic oligonucleotide
  Target: SCNA; (+) strand; PAM type: YTN; PAM sequence: CTT
catatacgagttgacaaatt

SEQ ID NO: 79248 - DNA, 20 bp, Artificial Sequence
  Description of Artificial Sequence: Synthetic oligonucleotide
  Target: SCNA; (+) strand; PAM type: YTN; PAM sequence: TTC
atatacgagttgacaaattg

SEQ ID NO: 79249 - DNA, 20 bp, Artificial Sequence
  Description of Artificial Sequence: Synthetic oligonucleotide
  Target: SCNA; (+) strand; PAM type: YTN; PAM sequence: TTG
acaaattgttcattttctcc

SEQ ID NO: 79250 - DNA, 20 bp, Artificial Sequence
  Description of Artificial Sequence: Synthetic oligonucleotide
  Target: SCNA; (+) strand; PAM type: YTN; PAM sequence: TTG
ttcattttctccttgtagaa

SEQ ID NO: 79251 - DNA, 20 bp, Artificial Sequence
  Description of Artificial Sequence: Synthetic oligonucleotide
  Target: SCNA; (+) strand; PAM type: YTN; PAM sequence: TTC
attttctccttgtagaagaa

SEQ ID NO: 79252 - DNA, 20 bp, Artificial Sequence
  Description of Artificial Sequence: Synthetic oligonucleotide
  Target: SCNA; (+) strand; PAM type: YTN; PAM sequence: TTT
tctccttgtagaagaacaat

SEQ ID NO: 79253 - DNA, 20 bp, Artificial Sequence
  Description of Artificial Sequence: Synthetic oligonucleotide
  Target: SCNA; (+) strand; PAM type: YTN; PAM sequence: TTT
ctccttgtagaagaacaatt

SEQ ID NO: 79254 - DNA, 20 bp, Artificial Sequence
  Description of Artificial Sequence: Synthetic oligonucleotide
  Target: SCNA; (+) strand; PAM type: YTN; PAM sequence: TTC
tccttgtagaagaacaatta

SEQ ID NO: 79255 - DNA, 20 bp, Artificial Sequence
  Description of Artificial Sequence: Synthetic oligonucleotide
  Target: SCNA; (+) strand; PAM type: YTN; PAM sequence: CTC
cttgtagaagaacaattaaa

SEQ ID NO: 79256 - DNA, 20 bp, Artificial Sequence
  Description of Artificial Sequence: Synthetic oligonucleotide
  Target: SCNA; (+) strand; PAM type: YTN; PAM sequence: CTT
gtagaagaacaattaaattg

SEQ ID NO: 79257 - DNA, 20 bp, Artificial Sequence
  Description of Artificial Sequence: Synthetic oligonucleotide
  Target: SCNA; (+) strand; PAM type: YTN; PAM sequence: TTG
tagaagaacaattaaattga

SEQ ID NO: 79258 - DNA, 20 bp, Artificial Sequence
  Description of Artificial Sequence: Synthetic oligonucleotide
  Target: SCNA; (+) strand; PAM type: YTN; PAM sequence: TTA
aattgatgagatgtatcatc

SEQ ID NO: 79259 - DNA, 20 bp, Artificial Sequence
  Description of Artificial Sequence: Synthetic oligonucleotide
  Target: SCNA; (+) strand; PAM type: YTN; PAM sequence: TTG
atgagatgtatcatctaact

SEQ ID NO: 79260 - DNA, 20 bp, Artificial Sequence
  Description of Artificial Sequence: Synthetic oligonucleotide
  Target: SCNA; (+) strand; PAM type: YTN; PAM sequence: CTA
actctcatacacgtaattat

SEQ ID NO: 79261 - DNA, 20 bp, Artificial Sequence
  Description of Artificial Sequence: Synthetic oligonucleotide
  Target: SCNA; (+) strand; PAM type: YTN; PAM sequence: CTC
tcatacacgtaattatatat

SEQ ID NO: 79262 - DNA, 20 bp, Artificial Sequence
  Description of Artificial Sequence: Synthetic oligonucleotide
  Target: SCNA; (+) strand; PAM type: YTN; PAM sequence: CTC
atacacgtaattatatattt

SEQ ID NO: 79263 - DNA, 20 bp, Artificial Sequence
  Description of Artificial Sequence: Synthetic oligonucleotide
  Target: SCNA; (+) strand; PAM type: YTN; PAM sequence: TTA
tatatttgcatgacaaatac

SEQ ID NO: 79264 - DNA, 20 bp, Artificial Sequence
  Description of Artificial Sequence: Synthetic oligonucleotide
  Target: SCNA; (+) strand; PAM type: YTN; PAM sequence: TTT
gcatgacaaatacaattggc

SEQ ID NO: 79265 - DNA, 20 bp, Artificial Sequence
  Description of Artificial Sequence: Synthetic oligonucleotide
  Target: SCNA; (+) strand; PAM type: YTN; PAM sequence: TTG
catgacaaatacaattggca

SEQ ID NO: 79266 - DNA, 20 bp, Artificial Sequence
  Description of Artificial Sequence: Synthetic oligonucleotide
  Target: SCNA; (+) strand; PAM type: YTN; PAM sequence: TTG
gcatctcatttacctcattt

SEQ ID NO: 79267 - DNA, 20 bp, Artificial Sequence
  Description of Artificial Sequence: Synthetic oligonucleotide
  Target: SCNA; (+) strand; PAM type: YTN; PAM sequence: CTC
atttacctcatttctgtacc

SEQ ID NO: 79268 - DNA, 20 bp, Artificial Sequence
  Description of Artificial Sequence: Synthetic oligonucleotide
  Target: SCNA; (+) strand; PAM type: YTN; PAM sequence: TTT
acctcatttctgtacccttg

SEQ ID NO: 79269 - DNA, 20 bp, Artificial Sequence
  Description of Artificial Sequence: Synthetic oligonucleotide
  Target: SCNA; (+) strand; PAM type: YTN; PAM sequence: TTA
cctcatttctgtacccttga

SEQ ID NO: 79270 - DNA, 20 bp, Artificial Sequence
  Description of Artificial Sequence: Synthetic oligonucleotide
  Target: SCNA; (+) strand; PAM type: YTN; PAM sequence: CTC
atttctgtacccttgaatat

SEQ ID NO: 79271 - DNA, 20 bp, Artificial Sequence
  Description of Artificial Sequence: Synthetic oligonucleotide
  Target: SCNA; (+) strand; PAM type: YTN; PAM sequence: TTT
ctgtacccttgaatatcacg

SEQ ID NO: 79272 - DNA, 20 bp, Artificial Sequence
  Description of Artificial Sequence: Synthetic oligonucleotide
  Target: SCNA; (+) strand; PAM type: YTN; PAM sequence: TTC
tgtacccttgaatatcacgt

SEQ ID NO: 79273 - DNA, 20 bp, Artificial Sequence
  Description of Artificial Sequence: Synthetic oligonucleotide
  Target: SCNA; (+) strand; PAM type: YTN; PAM sequence: CTG
tacccttgaatatcacgtaa

SEQ ID NO: 79274 - DNA, 20 bp, Artificial Sequence
  Description of Artificial Sequence: Synthetic oligonucleotide
  Target: SCNA; (+) strand; PAM type: YTN; PAM sequence: CTT
gaatatcacgtaaacatatt

SEQ ID NO: 79275 - DNA, 20 bp, Artificial Sequence
  Description of Artificial Sequence: Synthetic oligonucleotide
  Target: SCNA; (+) strand; PAM type: YTN; PAM sequence: TTG
aatatcacgtaaacatattt

SEQ ID NO: 79276 - DNA, 20 bp, Artificial Sequence
  Description of Artificial Sequence: Synthetic oligonucleotide
  Target: SCNA; (+) strand; PAM type: YTN; PAM sequence: TTT
tgtcctgatttttaaatact

SEQ ID NO: 79277 - DNA, 20 bp, Artificial Sequence
  Description of Artificial Sequence: Synthetic oligonucleotide
  Target: SCNA; (+) strand; PAM type: YTN; PAM sequence: TTT
gtcctgatttttaaatactt

SEQ ID NO: 79278 - DNA, 20 bp, Artificial Sequence
  Description of Artificial Sequence: Synthetic oligonucleotide
  Target: SCNA; (+) strand; PAM type: YTN; PAM sequence: TTG
tcctgatttttaaatacttt

SEQ ID NO: 79279 - DNA, 20 bp, Artificial Sequence
  Description of Artificial Sequence: Synthetic oligonucleotide
  Target: SCNA; (+) strand; PAM type: YTN; PAM sequence: CTG
atttttaaatactttgaata

SEQ ID NO: 79280 - DNA, 20 bp, Artificial Sequence
  Description of Artificial Sequence: Synthetic oligonucleotide
  Target: SCNA; (+) strand; PAM type: YTN; PAM sequence: TTT
ttaaatactttgaatagttt

SEQ ID NO: 79281 - DNA, 20 bp, Artificial Sequence
  Description of Artificial Sequence: Synthetic oligonucleotide
  Target: SCNA; (+) strand; PAM type: YTN; PAM sequence: TTT
taaatactttgaatagtttg

SEQ ID NO: 79282 - DNA, 20 bp, Artificial Sequence
  Description of Artificial Sequence: Synthetic oligonucleotide
  Target: SCNA; (+) strand; PAM type: YTN; PAM sequence: TTT
aaatactttgaatagtttga

SEQ ID NO: 79283 - DNA, 20 bp, Artificial Sequence
  Description of Artificial Sequence: Synthetic oligonucleotide
  Target: SCNA; (+) strand; PAM type: YTN; PAM sequence: TTA
aatactttgaatagtttgag

SEQ ID NO: 79284 - DNA, 20 bp, Artificial Sequence
  Description of Artificial Sequence: Synthetic oligonucleotide
  Target: SCNA; (+) strand; PAM type: YTN; PAM sequence: CTT
tgaatagtttgagaaccaaa

SEQ ID NO: 79285 - DNA, 20 bp, Artificial Sequence
  Description of Artificial Sequence: Synthetic oligonucleotide
  Target: SCNA; (+) strand; PAM type: YTN; PAM sequence: TTT
gaatagtttgagaaccaaaa

SEQ ID NO: 79286 - DNA, 20 bp, Artificial Sequence
  Description of Artificial Sequence: Synthetic oligonucleotide
  Target: SCNA; (+) strand; PAM type: YTN; PAM sequence: TTG
aatagtttgagaaccaaaag

SEQ ID NO: 79287 - DNA, 20 bp, Artificial Sequence
  Description of Artificial Sequence: Synthetic oligonucleotide
  Target: SCNA; (+) strand; PAM type: YTN; PAM sequence: TTT
gagaaccaaaagacctcttt

SEQ ID NO: 79288 - DNA, 20 bp, Artificial Sequence
  Description of Artificial Sequence: Synthetic oligonucleotide
  Target: SCNA; (+) strand; PAM type: YTN; PAM sequence: TTG
agaaccaaaagacctctttt

SEQ ID NO: 79289 - DNA, 20 bp, Artificial Sequence
  Description of Artificial Sequence: Synthetic oligonucleotide
  Target: SCNA; (+) strand; PAM type: YTN; PAM sequence: CTC
ttttgacaatttcctcttga

SEQ ID NO: 79290 - DNA, 20 bp, Artificial Sequence
  Description of Artificial Sequence: Synthetic oligonucleotide
  Target: SCNA; (+) strand; PAM type: YTN; PAM sequence: CTT
ttgacaatttcctcttgata

SEQ ID NO: 79291 - DNA, 20 bp, Artificial Sequence
  Description of Artificial Sequence: Synthetic oligonucleotide
  Target: SCNA; (+) strand; PAM type: YTN; PAM sequence: TTT
tgacaatttcctcttgataa

SEQ ID NO: 79292 - DNA, 20 bp, Artificial Sequence
  Description of Artificial Sequence: Synthetic oligonucleotide
  Target: SCNA; (+) strand; PAM type: YTN; PAM sequence: TTT
gacaatttcctcttgataaa

SEQ ID NO: 79293 - DNA, 20 bp, Artificial Sequence
  Description of Artificial Sequence: Synthetic oligonucleotide
  Target: SCNA; (+) strand; PAM type: YTN; PAM sequence: TTG
acaatttcctcttgataaag

SEQ ID NO: 79294 - DNA, 20 bp, Artificial Sequence
  Description of Artificial Sequence: Synthetic oligonucleotide
  Target: SCNA; (+) strand; PAM type: YTN; PAM sequence: TTT
cctcttgataaagcaaatag

SEQ ID NO: 79295 - DNA, 20 bp, Artificial Sequence
  Description of Artificial Sequence: Synthetic oligonucleotide
  Target: SCNA; (+) strand; PAM type: YTN; PAM sequence: TTC
ctcttgataaagcaaatagc

SEQ ID NO: 79296 - DNA, 20 bp, Artificial Sequence
  Description of Artificial Sequence: Synthetic oligonucleotide
  Target: SCNA; (+) strand; PAM type: YTN; PAM sequence: CTC
ttgataaagcaaatagcatc

SEQ ID NO: 79297 - DNA, 20 bp, Artificial Sequence
  Description of Artificial Sequence: Synthetic oligonucleotide
  Target: SCNA; (+) strand; PAM type: YTN; PAM sequence: CTT
gataaagcaaatagcatcat

SEQ ID NO: 79298 - DNA, 20 bp, Artificial Sequence
  Description of Artificial Sequence: Synthetic oligonucleotide
  Target: SCNA; (+) strand; PAM type: YTN; PAM sequence: TTG
ataaagcaaatagcatcatc

SEQ ID NO: 79299 - DNA, 20 bp, Artificial Sequence
  Description of Artificial Sequence: Synthetic oligonucleotide
  Target: SCNA; (+) strand; PAM type: YTN; PAM sequence: CTC
cctaaaacttaaaagctaac

SEQ ID NO: 79300 - DNA, 20 bp, Artificial Sequence
  Description of Artificial Sequence: Synthetic oligonucleotide
  Target: SCNA; (+) strand; PAM type: YTN; PAM sequence: CTA
aaacttaaaagctaacagcc

SEQ ID NO: 79301 - DNA, 20 bp, Artificial Sequence
  Description of Artificial Sequence: Synthetic oligonucleotide
  Target: SCNA; (+) strand; PAM type: YTN; PAM sequence: CTT
aaaagctaacagcctatgct

SEQ ID NO: 79302 - DNA, 20 bp, Artificial Sequence
  Description of Artificial Sequence: Synthetic oligonucleotide
  Target: SCNA; (+) strand; PAM type: YTN; PAM sequence: TTA
aaagctaacagcctatgctt

SEQ ID NO: 79303 - DNA, 20 bp, Artificial Sequence
  Description of Artificial Sequence: Synthetic oligonucleotide
  Target: SCNA; (+) strand; PAM type: YTN; PAM sequence: CTA
acagcctatgcttgaagggg

SEQ ID NO: 79304 - DNA, 20 bp, Artificial Sequence
  Description of Artificial Sequence: Synthetic oligonucleotide
  Target: SCNA; (+) strand; PAM type: YTN; PAM sequence: CTA
tgcttgaaggggcagaaaag

SEQ ID NO: 79305 - DNA, 20 bp, Artificial Sequence
  Description of Artificial Sequence: Synthetic oligonucleotide
  Target: SCNA; (+) strand; PAM type: YTN; PAM sequence: CTT
gaaggggcagaaaagtcaag

SEQ ID NO: 79306 - DNA, 20 bp, Artificial Sequence
  Description of Artificial Sequence: Synthetic oligonucleotide
  Target: SCNA; (+) strand; PAM type: YTN; PAM sequence: TTG
aaggggcagaaaagtcaagt

SEQ ID NO: 79307 - DNA, 20 bp, Artificial Sequence
  Description of Artificial Sequence: Synthetic oligonucleotide
  Target: SCNA; (+) strand; PAM type: YTN; PAM sequence: TTA
tttcttactttttagggaca

SEQ ID NO: 79308 - DNA, 20 bp, Artificial Sequence
  Description of Artificial Sequence: Synthetic oligonucleotide
  Target: SCNA; (+) strand; PAM type: YTN; PAM sequence: TTT
cttactttttagggacaaac

SEQ ID NO: 79309 - DNA, 20 bp, Artificial Sequence
  Description of Artificial Sequence: Synthetic oligonucleotide
  Target: SCNA; (+) strand; PAM type: YTN; PAM sequence: TTC
ttactttttagggacaaaca

SEQ ID NO: 79310 - DNA, 20 bp, Artificial Sequence
  Description of Artificial Sequence: Synthetic oligonucleotide
  Target: SCNA; (+) strand; PAM type: YTN; PAM sequence: CTT
actttttagggacaaacagg

SEQ ID NO: 79311 - DNA, 20 bp, Artificial Sequence
  Description of Artificial Sequence: Synthetic oligonucleotide
  Target: SCNA; (+) strand; PAM type: YTN; PAM sequence: TTA
ctttttagggacaaacaggt

SEQ ID NO: 79312 - DNA, 20 bp, Artificial Sequence
  Description of Artificial Sequence: Synthetic oligonucleotide
  Target: SCNA; (+) strand; PAM type: YTN; PAM sequence: CTT
tttagggacaaacaggttgt

SEQ ID NO: 79313 - DNA, 20 bp, Artificial Sequence
  Description of Artificial Sequence: Synthetic oligonucleotide
  Target: SCNA; (+) strand; PAM type: YTN; PAM sequence: TTT
ttagggacaaacaggttgtt

SEQ ID NO: 79314 - DNA, 20 bp, Artificial Sequence
  Description of Artificial Sequence: Synthetic oligonucleotide
  Target: SCNA; (+) strand; PAM type: YTN; PAM sequence: TTT
tagggacaaacaggttgttt

SEQ ID NO: 79315 - DNA, 20 bp, Artificial Sequence
  Description of Artificial Sequence: Synthetic oligonucleotide
  Target: SCNA; (+) strand; PAM type: YTN; PAM sequence: TTT
agggacaaacaggttgttta

SEQ ID NO: 79316 - DNA, 20 bp, Artificial Sequence
  Description of Artificial Sequence: Synthetic oligonucleotide
  Target: SCNA; (+) strand; PAM type: YTN; PAM sequence: TTA
gggacaaacaggttgtttat

SEQ ID NO: 79317 - DNA, 20 bp, Artificial Sequence
  Description of Artificial Sequence: Synthetic oligonucleotide
  Target: SCNA; (+) strand; PAM type: YTN; PAM sequence: TTG
tttatcattgtagttggaga

SEQ ID NO: 79318 - DNA, 20 bp, Artificial Sequence
  Description of Artificial Sequence: Synthetic oligonucleotide
  Target: SCNA; (+) strand; PAM type: YTN; PAM sequence: TTT
atcattgtagttggagacaa

SEQ ID NO: 79319 - DNA, 20 bp, Artificial Sequence
  Description of Artificial Sequence: Synthetic oligonucleotide
  Target: SCNA; (+) strand; PAM type: YTN; PAM sequence: TTA
tcattgtagttggagacaag

SEQ ID NO: 79320 - DNA, 20 bp, Artificial Sequence
  Description of Artificial Sequence: Synthetic oligonucleotide
  Target: SCNA; (+) strand; PAM type: YTN; PAM sequence: TTG
tagttggagacaagatatat

SEQ ID NO: 79321 - DNA, 20 bp, Artificial Sequence
  Description of Artificial Sequence: Synthetic oligonucleotide
  Target: SCNA; (+) strand; PAM type: YTN; PAM sequence: TTG
gagacaagatatatggaata

SEQ ID NO: 79322 - DNA, 20 bp, Artificial Sequence
  Description of Artificial Sequence: Synthetic oligonucleotide
  Target: SCNA; (+) strand; PAM type: YTN; PAM sequence: CTT
atcctatttatgcccgtcac

SEQ ID NO: 79323 - DNA, 20 bp, Artificial Sequence
  Description of Artificial Sequence: Synthetic oligonucleotide
  Target: SCNA; (+) strand; PAM type: YTN; PAM sequence: TTA
tcctatttatgcccgtcacc

SEQ ID NO: 79324 - DNA, 20 bp, Artificial Sequence
  Description of Artificial Sequence: Synthetic oligonucleotide
  Target: SCNA; (+) strand; PAM type: YTN; PAM sequence: CTA
tttatgcccgtcacctaaac

SEQ ID NO: 79325 - DNA, 20 bp, Artificial Sequence
  Description of Artificial Sequence: Synthetic oligonucleotide
  Target: SCNA; (+) strand; PAM type: YTN; PAM sequence: TTT
atgcccgtcacctaaacata

SEQ ID NO: 79326 - DNA, 20 bp, Artificial Sequence
  Description of Artificial Sequence: Synthetic oligonucleotide
  Target: SCNA; (+) strand; PAM type: YTN; PAM sequence: TTA
tgcccgtcacctaaacatat

SEQ ID NO: 79327 - DNA, 20 bp, Artificial Sequence
  Description of Artificial Sequence: Synthetic oligonucleotide
  Target: SCNA; (+) strand; PAM type: YTN; PAM sequence: CTA
aacatataagtgctattttt

SEQ ID NO: 79328 - DNA, 20 bp, Artificial Sequence
  Description of Artificial Sequence: Synthetic oligonucleotide
  Target: SCNA; (+) strand; PAM type: YTN; PAM sequence: CTA
tttttccaagtttattatca

SEQ ID NO: 79329 - DNA, 20 bp, Artificial Sequence
  Description of Artificial Sequence: Synthetic oligonucleotide
  Target: SCNA; (+) strand; PAM type: YTN; PAM sequence: TTT
ttccaagtttattatcaaat

SEQ ID NO: 79330 - DNA, 20 bp, Artificial Sequence
  Description of Artificial Sequence: Synthetic oligonucleotide
  Target: SCNA; (+) strand; PAM type: YTN; PAM sequence: TTT
tccaagtttattatcaaatt

SEQ ID NO: 79331 - DNA, 20 bp, Artificial Sequence
  Description of Artificial Sequence: Synthetic oligonucleotide
  Target: SCNA; (+) strand; PAM type: YTN; PAM sequence: TTT
ccaagtttattatcaaatta

SEQ ID NO: 79332 - DNA, 20 bp, Artificial Sequence
  Description of Artificial Sequence: Synthetic oligonucleotide
  Target: SCNA; (+) strand; PAM type: YTN; PAM sequence: TTC
caagtttattatcaaattac

SEQ ID NO: 79333 - DNA, 20 bp, Artificial Sequence
  Description of Artificial Sequence: Synthetic oligonucleotide
  Target: SCNA; (+) strand; PAM type: YTN; PAM sequence: TTT
attatcaaattacaaagtgg

SEQ ID NO: 79334 - DNA, 20 bp, Artificial Sequence
  Description of Artificial Sequence: Synthetic oligonucleotide
  Target: SCNA; (+) strand; PAM type: YTN; PAM sequence: TTA
ttatcaaattacaaagtgga

SEQ ID NO: 79335 - DNA, 20 bp, Artificial Sequence
  Description of Artificial Sequence: Synthetic oligonucleotide
  Target: SCNA; (+) strand; PAM type: YTN; PAM sequence: TTA
tcaaattacaaagtggaaat

SEQ ID NO: 79336 - DNA, 20 bp, Artificial Sequence
  Description of Artificial Sequence: Synthetic oligonucleotide
  Target: SCNA; (+) strand; PAM type: YTN; PAM sequence: TTA
caaagtggaaatatggctca

SEQ ID NO: 79337 - DNA, 20 bp, Artificial Sequence
  Description of Artificial Sequence: Synthetic oligonucleotide
  Target: SCNA; (+) strand; PAM type: YTN; PAM sequence: CTC
agatggtagtagaggtaaaa

SEQ ID NO: 79338 - DNA, 20 bp, Artificial Sequence
  Description of Artificial Sequence: Synthetic oligonucleotide
  Target: SCNA; (+) strand; PAM type: YTN; PAM sequence: CTA
agtcatgtaagatgagtaag

SEQ ID NO: 79339 - DNA, 20 bp, Artificial Sequence
  Description of Artificial Sequence: Synthetic oligonucleotide
  Target: SCNA; (+) strand; PAM type: YTN; PAM sequence: CTA
aagatctaatgtacaacatg

SEQ ID NO: 79340 - DNA, 20 bp, Artificial Sequence
  Description of Artificial Sequence: Synthetic oligonucleotide
  Target: SCNA; (+) strand; PAM type: YTN; PAM sequence: CTA
atgtacaacatgaagattat

SEQ ID NO: 79341 - DNA, 20 bp, Artificial Sequence
  Description of Artificial Sequence: Synthetic oligonucleotide
  Target: SCNA; (+) strand; PAM type: YTN; PAM sequence: TTA
ttgttaataatattgtagtg

SEQ ID NO: 79342 - DNA, 20 bp, Artificial Sequence
  Description of Artificial Sequence: Synthetic oligonucleotide
  Target: SCNA; (+) strand; PAM type: YTN; PAM sequence: TTG
ttaataatattgtagtgcat

SEQ ID NO: 79343 - DNA, 20 bp, Artificial Sequence
  Description of Artificial Sequence: Synthetic oligonucleotide
  Target: SCNA; (+) strand; PAM type: YTN; PAM sequence: TTA
ataatattgtagtgcatact

SEQ ID NO: 79344 - DNA, 20 bp, Artificial Sequence
  Description of Artificial Sequence: Synthetic oligonucleotide
  Target: SCNA; (+) strand; PAM type: YTN; PAM sequence: TTG
tagtgcatactggtaatttt

SEQ ID NO: 79345 - DNA, 20 bp, Artificial Sequence
  Description of Artificial Sequence: Synthetic oligonucleotide
  Target: SCNA; (+) strand; PAM type: YTN; PAM sequence: CTG
gtaatttttcaagaaagtag

SEQ ID NO: 79346 - DNA, 20 bp, Artificial Sequence
  Description of Artificial Sequence: Synthetic oligonucleotide
  Target: SCNA; (+) strand; PAM type: YTN; PAM sequence: TTT
ttcaagaaagtagattttag

SEQ ID NO: 79347 - DNA, 20 bp, Artificial Sequence
  Description of Artificial Sequence: Synthetic oligonucleotide
  Target: SCNA; (+) strand; PAM type: YTN; PAM sequence: TTT
tcaagaaagtagattttagg

SEQ ID NO: 79348 - DNA, 20 bp, Artificial Sequence
  Description of Artificial Sequence: Synthetic oligonucleotide
  Target: SCNA; (+) strand; PAM type: YTN; PAM sequence: TTT
caagaaagtagattttaggc

SEQ ID NO: 79349 - DNA, 20 bp, Artificial Sequence
  Description of Artificial Sequence: Synthetic oligonucleotide
  Target: SCNA; (+) strand; PAM type: YTN; PAM sequence: TTC
aagaaagtagattttaggca

SEQ ID NO: 79350 - DNA, 20 bp, Artificial Sequence
  Description of Artificial Sequence: Synthetic oligonucleotide
  Target: SCNA; (+) strand; PAM type: YTN; PAM sequence: TTT
taggcactgatagtaaaaaa

SEQ ID NO: 79351 - DNA, 20 bp, Artificial Sequence
  Description of Artificial Sequence: Synthetic oligonucleotide
  Target: SCNA; (+) strand; PAM type: YTN; PAM sequence: TTT
aggcactgatagtaaaaaag

SEQ ID NO: 79352 - DNA, 20 bp, Artificial Sequence
  Description of Artificial Sequence: Synthetic oligonucleotide
  Target: SCNA; (+) strand; PAM type: YTN; PAM sequence: TTA
ggcactgatagtaaaaaagc

SEQ ID NO: 79353 - DNA, 20 bp, Artificial Sequence
  Description of Artificial Sequence: Synthetic oligonucleotide
  Target: SCNA; (+) strand; PAM type: YTN; PAM sequence: CTG
atagtaaaaaagcaaagata

SEQ ID NO: 79354 - DNA, 20 bp, Artificial Sequence
  Description of Artificial Sequence: Synthetic oligonucleotide
  Target: SCNA; (+) strand; PAM type: YTN; PAM sequence: TTA
atttgcttcaatgtaggaat

SEQ ID NO: 79355 - DNA, 20 bp, Artificial Sequence
  Description of Artificial Sequence: Synthetic oligonucleotide
  Target: SCNA; (+) strand; PAM type: YTN; PAM sequence: TTT
gcttcaatgtaggaatcact

SEQ ID NO: 79356 - DNA, 20 bp, Artificial Sequence
  Description of Artificial Sequence: Synthetic oligonucleotide
  Target: SCNA; (+) strand; PAM type: YTN; PAM sequence: TTG
cttcaatgtaggaatcactt

SEQ ID NO: 79357 - DNA, 20 bp, Artificial Sequence
  Description of Artificial Sequence: Synthetic oligonucleotide
  Target: SCNA; (+) strand; PAM type: YTN; PAM sequence: CTT
caatgtaggaatcactttta

SEQ ID NO: 79358 - DNA, 20 bp, Artificial Sequence
  Description of Artificial Sequence: Synthetic oligonucleotide
  Target: SCNA; (+) strand; PAM type: YTN; PAM sequence: TTC
aatgtaggaatcacttttat

SEQ ID NO: 79359 - DNA, 20 bp, Artificial Sequence
  Description of Artificial Sequence: Synthetic oligonucleotide
  Target: SCNA; (+) strand; PAM type: YTN; PAM sequence: CTT
ttatatacgtgtgtatatta

SEQ ID NO: 79360 - DNA, 20 bp, Artificial Sequence
  Description of Artificial Sequence: Synthetic oligonucleotide
  Target: SCNA; (+) strand; PAM type: YTN; PAM sequence: TTT
tatatacgtgtgtatattat

SEQ ID NO: 79361 - DNA, 20 bp, Artificial Sequence
  Description of Artificial Sequence: Synthetic oligonucleotide
  Target: SCNA; (+) strand; PAM type: YTN; PAM sequence: TTT
atatacgtgtgtatattata

SEQ ID NO: 79362 - DNA, 20 bp, Artificial Sequence
  Description of Artificial Sequence: Synthetic oligonucleotide
  Target: SCNA; (+) strand; PAM type: YTN; PAM sequence: TTA
tatacgtgtgtatattatat

SEQ ID NO: 79363 - DNA, 20 bp, Artificial Sequence
  Description of Artificial Sequence: Synthetic oligonucleotide
  Target: SCNA; (+) strand; PAM type: YTN; PAM sequence: TTA
tatatatatataaataaaga

SEQ ID NO: 79364 - DNA, 20 bp, Artificial Sequence
  Description of Artificial Sequence: Synthetic oligonucleotide
  Target: SCNA; (+) strand; PAM type: YTN; PAM sequence: CTC
aaaacatcatgctgtacaac

SEQ ID NO: 79365 - DNA, 20 bp, Artificial Sequence
  Description of Artificial Sequence: Synthetic oligonucleotide
  Target: SCNA; (+) strand; PAM type: YTN; PAM sequence: CTG
tacaacttaaatgtatacaa

SEQ ID NO: 79366 - DNA, 20 bp, Artificial Sequence
  Description of Artificial Sequence: Synthetic oligonucleotide
  Target: SCNA; (+) strand; PAM type: YTN; PAM sequence: CTT
aaatgtatacaattaaaaat

SEQ ID NO: 79367 - DNA, 20 bp, Artificial Sequence
  Description of Artificial Sequence: Synthetic oligonucleotide
  Target: SCNA; (+) strand; PAM type: YTN; PAM sequence: TTA
aatgtatacaattaaaaata

SEQ ID NO: 79368 - DNA, 20 bp, Artificial Sequence
  Description of Artificial Sequence: Synthetic oligonucleotide
  Target: SCNA; (+) strand; PAM type: YTN; PAM sequence: TTA
aaaataattttacaatacaa

SEQ ID NO: 79369 - DNA, 20 bp, Artificial Sequence
  Description of Artificial Sequence: Synthetic oligonucleotide
  Target: SCNA; (+) strand; PAM type: YTN; PAM sequence: TTT
tacaatacaactaagtttga

SEQ ID NO: 79370 - DNA, 20 bp, Artificial Sequence
  Description of Artificial Sequence: Synthetic oligonucleotide
  Target: SCNA; (+) strand; PAM type: YTN; PAM sequence: TTT
acaatacaactaagtttgaa

SEQ ID NO: 79371 - DNA, 20 bp, Artificial Sequence
  Description of Artificial Sequence: Synthetic oligonucleotide
  Target: SCNA; (+) strand; PAM type: YTN; PAM sequence: TTA
caatacaactaagtttgaag

SEQ ID NO: 79372 - DNA, 20 bp, Artificial Sequence
  Description of Artificial Sequence: Synthetic oligonucleotide
  Target: SCNA; (+) strand; PAM type: YTN; PAM sequence: CTA
agtttgaagtcatcctacat

SEQ ID NO: 79373 - DNA, 20 bp, Artificial Sequence
  Description of Artificial Sequence: Synthetic oligonucleotide
  Target: SCNA; (+) strand; PAM type: YTN; PAM sequence: TTT
gaagtcatcctacatttaac

SEQ ID NO: 79374 - DNA, 20 bp, Artificial Sequence
  Description of Artificial Sequence: Synthetic oligonucleotide
  Target: SCNA; (+) strand; PAM type: YTN; PAM sequence: TTG
aagtcatcctacatttaaca

SEQ ID NO: 79375 - DNA, 20 bp, Artificial Sequence
  Description of Artificial Sequence: Synthetic oligonucleotide
  Target: SCNA; (+) strand; PAM type: YTN; PAM sequence: CTA
catttaacagtatctcatta

SEQ ID NO: 79376 - DNA, 20 bp, Artificial Sequence
  Description of Artificial Sequence: Synthetic oligonucleotide
  Target: SCNA; (+) strand; PAM type: YTN; PAM sequence: TTT
aacagtatctcattaatgaa

SEQ ID NO: 79377 - DNA, 20 bp, Artificial Sequence
  Description of Artificial Sequence: Synthetic oligonucleotide
  Target: SCNA; (+) strand; PAM type: YTN; PAM sequence: TTA
acagtatctcattaatgaaa

SEQ ID NO: 79378 - DNA, 20 bp, Artificial Sequence
  Description of Artificial Sequence: Synthetic oligonucleotide
  Target: SCNA; (+) strand; PAM type: YTN; PAM sequence: CTC
attaatgaaaccagcaaaat

SEQ ID NO: 79379 - DNA, 20 bp, Artificial Sequence
  Description of Artificial Sequence: Synthetic oligonucleotide
  Target: SCNA; (+) strand; PAM type: YTN; PAM sequence: TTA
atgaaaccagcaaaattatc

SEQ ID NO: 79380 - DNA, 20 bp, Artificial Sequence
  Description of Artificial Sequence: Synthetic oligonucleotide
  Target: SCNA; (+) strand; PAM type: YTN; PAM sequence: TTA
tcatgccatctttgcaagtg

SEQ ID NO: 79381 - DNA, 20 bp, Artificial Sequence
  Description of Artificial Sequence: Synthetic oligonucleotide
  Target: SCNA; (+) strand; PAM type: YTN; PAM sequence: CTT
tgcaagtgaaggaatactaa

SEQ ID NO: 79382 - DNA, 20 bp, Artificial Sequence
  Description of Artificial Sequence: Synthetic oligonucleotide
  Target: SCNA; (+) strand; PAM type: YTN; PAM sequence: TTT
gcaagtgaaggaatactaac

SEQ ID NO: 79383 - DNA, 20 bp, Artificial Sequence
  Description of Artificial Sequence: Synthetic oligonucleotide
  Target: SCNA; (+) strand; PAM type: YTN; PAM sequence: TTG
caagtgaaggaatactaaca

SEQ ID NO: 79384 - DNA, 20 bp, Artificial Sequence
  Description of Artificial Sequence: Synthetic oligonucleotide
  Target: SCNA; (+) strand; PAM type: YTN; PAM sequence: CTA
acaatagacgttagcacatg

SEQ ID NO: 79385 - DNA, 20 bp, Artificial Sequence
  Description of Artificial Sequence: Synthetic oligonucleotide
  Target: SCNA; (+) strand; PAM type: YTN; PAM sequence: TTA
gcacatgcacagtaaaaatg

SEQ ID NO: 79386 - DNA, 20 bp, Artificial Sequence
  Description of Artificial Sequence: Synthetic oligonucleotide
  Target: SCNA; (+) strand; PAM type: YTN; PAM sequence: TTC
acagaagtgtggtcattgct

SEQ ID NO: 79387 - DNA, 20 bp, Artificial Sequence
  Description of Artificial Sequence: Synthetic oligonucleotide
  Target: SCNA; (+) strand; PAM type: YTN; PAM sequence: TTG
ctctcacgttgcagtccaca

SEQ ID NO: 79388 - DNA, 20 bp, Artificial Sequence
  Description of Artificial Sequence: Synthetic oligonucleotide
  Target: SCNA; (+) strand; PAM type: YTN; PAM sequence: CTC
tcacgttgcagtccacagaa

SEQ ID NO: 79389 - DNA, 20 bp, Artificial Sequence
  Description of Artificial Sequence: Synthetic oligonucleotide
  Target: SCNA; (+) strand; PAM type: YTN; PAM sequence: CTC
acgttgcagtccacagaatt

SEQ ID NO: 79390 - DNA, 20 bp, Artificial Sequence
  Description of Artificial Sequence: Synthetic oligonucleotide
  Target: SCNA; (+) strand; PAM type: YTN; PAM sequence: TTG
cagtccacagaattttaagc

SEQ ID NO: 79391 - DNA, 20 bp, Artificial Sequence
  Description of Artificial Sequence: Synthetic oligonucleotide
  Target: SCNA; (+) strand; PAM type: YTN; PAM sequence: TTT
taagctatgttaaacattta

SEQ ID NO: 79392 - DNA, 20 bp, Artificial Sequence
  Description of Artificial Sequence: Synthetic oligonucleotide
  Target: SCNA; (+) strand; PAM type: YTN; PAM sequence: TTT
aagctatgttaaacatttat

SEQ ID NO: 79393 - DNA, 20 bp, Artificial Sequence
  Description of Artificial Sequence: Synthetic oligonucleotide
  Target: SCNA; (+) strand; PAM type: YTN; PAM sequence: TTA
agctatgttaaacatttatg

SEQ ID NO: 79394 - DNA, 20 bp, Artificial Sequence
  Description of Artificial Sequence: Synthetic oligonucleotide
  Target: SCNA; (+) strand; PAM type: YTN; PAM sequence: CTA
tgttaaacatttatgaagga

SEQ ID NO: 79395 - DNA, 20 bp, Artificial Sequence
  Description of Artificial Sequence: Synthetic oligonucleotide
  Target: SCNA; (+) strand; PAM type: YTN; PAM sequence: TTA
aacatttatgaaggaacaag

SEQ ID NO: 79396 - DNA, 20 bp, Artificial Sequence
  Description of Artificial Sequence: Synthetic oligonucleotide
  Target: SCNA; (+) strand; PAM type: YTN; PAM sequence: TTT
atgaaggaacaagggaagtg

SEQ ID NO: 79397 - DNA, 20 bp, Artificial Sequence
  Description of Artificial Sequence: Synthetic oligonucleotide
  Target: SCNA; (+) strand; PAM type: YTN; PAM sequence: TTA
tgaaggaacaagggaagtgc

SEQ ID NO: 79398 - DNA, 20 bp, Artificial Sequence
  Description of Artificial Sequence: Synthetic oligonucleotide
  Target: SCNA; (+) strand; PAM type: YTN; PAM sequence: TTT
aaacctatttgttggtgtaa

SEQ ID NO: 79399 - DNA, 20 bp, Artificial Sequence
  Description of Artificial Sequence: Synthetic oligonucleotide
  Target: SCNA; (+) strand; PAM type: YTN; PAM sequence: TTA
aacctatttgttggtgtaac

SEQ ID NO: 79400 - DNA, 20 bp, Artificial Sequence
  Description of Artificial Sequence: Synthetic oligonucleotide
  Target: SCNA; (+) strand; PAM type: YTN; PAM sequence: CTA
tttgttggtgtaacgtgatg

SEQ ID NO: 79401 - DNA, 20 bp, Artificial Sequence
  Description of Artificial Sequence: Synthetic oligonucleotide
  Target: SCNA; (+) strand; PAM type: YTN; PAM sequence: TTT
gttggtgtaacgtgatgcag

SEQ ID NO: 79402 - DNA, 20 bp, Artificial Sequence
  Description of Artificial Sequence: Synthetic oligonucleotide
  Target: SCNA; (+) strand; PAM type: YTN; PAM sequence: TTG
ttggtgtaacgtgatgcagt

SEQ ID NO: 79403 - DNA, 20 bp, Artificial Sequence
  Description of Artificial Sequence: Synthetic oligonucleotide
  Target: SCNA; (+) strand; PAM type: YTN; PAM sequence: TTG
gtgtaacgtgatgcagttct

SEQ ID NO: 79404 - DNA, 20 bp, Artificial Sequence
  Description of Artificial Sequence: Synthetic oligonucleotide
  Target: SCNA; (+) strand; PAM type: YTN; PAM sequence: TTC
tatcccactcatcctataat

SEQ ID NO: 79405 - DNA, 20 bp, Artificial Sequence
  Description of Artificial Sequence: Synthetic oligonucleotide
  Target: SCNA; (+) strand; PAM type: YTN; PAM sequence: CTA
tcccactcatcctataatac

SEQ ID NO: 79406 - DNA, 20 bp, Artificial Sequence
  Description of Artificial Sequence: Synthetic oligonucleotide
  Target: SCNA; (+) strand; PAM type: YTN; PAM sequence: CTC
atcctataatacatttcttt

SEQ ID NO: 79407 - DNA, 20 bp, Artificial Sequence
  Description of Artificial Sequence: Synthetic oligonucleotide
  Target: SCNA; (+) strand; PAM type: YTN; PAM sequence: CTA
taatacatttctttgacaaa

SEQ ID NO: 79408 - DNA, 20 bp, Artificial Sequence
  Description of Artificial Sequence: Synthetic oligonucleotide
  Target: SCNA; (+) strand; PAM type: YTN; PAM sequence: TTT
ctttgacaaacaaaactatc

SEQ ID NO: 79409 - DNA, 20 bp, Artificial Sequence
  Description of Artificial Sequence: Synthetic oligonucleotide
  Target: SCNA; (+) strand; PAM type: YTN; PAM sequence: TTC
tttgacaaacaaaactatca

SEQ ID NO: 79410 - DNA, 20 bp, Artificial Sequence
  Description of Artificial Sequence: Synthetic oligonucleotide
  Target: SCNA; (+) strand; PAM type: YTN; PAM sequence: CTT
tgacaaacaaaactatcatc

SEQ ID NO: 79411 - DNA, 20 bp, Artificial Sequence
  Description of Artificial Sequence: Synthetic oligonucleotide
  Target: SCNA; (+) strand; PAM type: YTN; PAM sequence: TTT
gacaaacaaaactatcatcg

SEQ ID NO: 79412 - DNA, 20 bp, Artificial Sequence
  Description of Artificial Sequence: Synthetic oligonucleotide
  Target: SCNA; (+) strand; PAM type: YTN; PAM sequence: TTG
acaaacaaaactatcatcgc

SEQ ID NO: 79413 - DNA, 20 bp, Artificial Sequence
  Description of Artificial Sequence: Synthetic oligonucleotide
  Target: SCNA; (+) strand; PAM type: YTN; PAM sequence: CTA
tcatcgcaatcagttctttg

SEQ ID NO: 79414 - DNA, 20 bp, Artificial Sequence
  Description of Artificial Sequence: Synthetic oligonucleotide
  Target: SCNA; (+) strand; PAM type: YTN; PAM sequence: TTC
tttgaatattaaaattggat

SEQ ID NO: 79415 - DNA, 20 bp, Artificial Sequence
  Description of Artificial Sequence: Synthetic oligonucleotide
  Target: SCNA; (+) strand; PAM type: YTN; PAM sequence: CTT
tgaatattaaaattggatgt

SEQ ID NO: 79416 - DNA, 20 bp, Artificial Sequence
  Description of Artificial Sequence: Synthetic oligonucleotide
  Target: SCNA; (+) strand; PAM type: YTN; PAM sequence: TTT
gaatattaaaattggatgta

SEQ ID NO: 79417 - DNA, 20 bp, Artificial Sequence
  Description of Artificial Sequence: Synthetic oligonucleotide
  Target: SCNA; (+) strand; PAM type: YTN; PAM sequence: TTG
aatattaaaattggatgtat

SEQ ID NO: 79418 - DNA, 20 bp, Artificial Sequence
  Description of Artificial Sequence: Synthetic oligonucleotide
  Target: SCNA; (+) strand; PAM type: YTN; PAM sequence: TTA
aaattggatgtatagtcatg

SEQ ID NO: 79419 - DNA, 20 bp, Artificial Sequence
  Description of Artificial Sequence: Synthetic oligonucleotide
  Target: SCNA; (+) strand; PAM type: YTN; PAM sequence: TTG
gatgtatagtcatgcatatg

SEQ ID NO: 79420 - DNA, 20 bp, Artificial Sequence
  Description of Artificial Sequence: Synthetic oligonucleotide
  Target: SCNA; (+) strand; PAM type: YTN; PAM sequence: TTG
tgggattgtaatgcttacag

SEQ ID NO: 79421 - DNA, 20 bp, Artificial Sequence
  Description of Artificial Sequence: Synthetic oligonucleotide
  Target: SCNA; (+) strand; PAM type: YTN; PAM sequence: TTG
taatgcttacagactattaa

SEQ ID NO: 79422 - DNA, 20 bp, Artificial Sequence
  Description of Artificial Sequence: Synthetic oligonucleotide
  Target: SCNA; (+) strand; PAM type: YTN; PAM sequence: CTT
acagactattaaccactgat

SEQ ID NO: 79423 - DNA, 20 bp, Artificial Sequence
  Description of Artificial Sequence: Synthetic oligonucleotide
  Target: SCNA; (+) strand; PAM type: YTN; PAM sequence: TTA
cagactattaaccactgatc

SEQ ID NO: 79424 - DNA, 20 bp, Artificial Sequence
  Description of Artificial Sequence: Synthetic oligonucleotide
  Target: SCNA; (+) strand; PAM type: YTN; PAM sequence: CTA
ttaaccactgatcctaagat

SEQ ID NO: 79425 - DNA, 20 bp, Artificial Sequence
  Description of Artificial Sequence: Synthetic oligonucleotide
  Target: SCNA; (+) strand; PAM type: YTN; PAM sequence: TTA
accactgatcctaagatttg

SEQ ID NO: 79426 - DNA, 20 bp, Artificial Sequence
  Description of Artificial Sequence: Synthetic oligonucleotide
  Target: SCNA; (+) strand; PAM type: YTN; PAM sequence: CTG
atcctaagatttgggtggaa

SEQ ID NO: 79427 - DNA, 20 bp, Artificial Sequence
  Description of Artificial Sequence: Synthetic oligonucleotide
  Target: SCNA; (+) strand; PAM type: YTN; PAM sequence: CTA
agatttgggtggaagtattt

SEQ ID NO: 79428 - DNA, 20 bp, Artificial Sequence
  Description of Artificial Sequence: Synthetic oligonucleotide
  Target: SCNA; (+) strand; PAM type: YTN; PAM sequence: TTT
gggtggaagtatttgtctct

SEQ ID NO: 79429 - DNA, 20 bp, Artificial Sequence
  Description of Artificial Sequence: Synthetic oligonucleotide
  Target: SCNA; (+) strand; PAM type: YTN; PAM sequence: TTG
ggtggaagtatttgtctcta

SEQ ID NO: 79430 - DNA, 20 bp, Artificial Sequence
  Description of Artificial Sequence: Synthetic oligonucleotide
  Target: SCNA; (+) strand; PAM type: YTN; PAM sequence: TTT
gtctctatatctaagcagct

SEQ ID NO: 79431 - DNA, 20 bp, Artificial Sequence
  Description of Artificial Sequence: Synthetic oligonucleotide
  Target: SCNA; (+) strand; PAM type: YTN; PAM sequence: TTG
tctctatatctaagcagcta

SEQ ID NO: 79432 - DNA, 20 bp, Artificial Sequence
  Description of Artificial Sequence: Synthetic oligonucleotide
  Target: SCNA; (+) strand; PAM type: YTN; PAM sequence: CTC
tatatctaagcagctaaaat

SEQ ID NO: 79433 - DNA, 20 bp, Artificial Sequence
  Description of Artificial Sequence: Synthetic oligonucleotide
  Target: SCNA; (+) strand; PAM type: YTN; PAM sequence: CTA
tatctaagcagctaaaatat

SEQ ID NO: 79434 - DNA, 20 bp, Artificial Sequence
  Description of Artificial Sequence: Synthetic oligonucleotide
  Target: SCNA; (+) strand; PAM type: YTN; PAM sequence: CTA
agcagctaaaatatcatggc

SEQ ID NO: 79435 - DNA, 20 bp, Artificial Sequence
  Description of Artificial Sequence: Synthetic oligonucleotide
  Target: SCNA; (+) strand; PAM type: YTN; PAM sequence: CTA
aaatatcatggctactatct

SEQ ID NO: 79436 - DNA, 20 bp, Artificial Sequence
  Description of Artificial Sequence: Synthetic oligonucleotide
  Target: SCNA; (+) strand; PAM type: YTN; PAM sequence: CTA
ctatctgtgcgtgtatgtga

SEQ ID NO: 79437 - DNA, 20 bp, Artificial Sequence
  Description of Artificial Sequence: Synthetic oligonucleotide
  Target: SCNA; (+) strand; PAM type: YTN; PAM sequence: CTA
tctgtgcgtgtatgtgaggt

SEQ ID NO: 79438 - DNA, 20 bp, Artificial Sequence
  Description of Artificial Sequence: Synthetic oligonucleotide
  Target: SCNA; (+) strand; PAM type: YTN; PAM sequence: CTG
tgcgtgtatgtgaggtaatt

SEQ ID NO: 79439 - DNA, 20 bp, Artificial Sequence
  Description of Artificial Sequence: Synthetic oligonucleotide
  Target: SCNA; (+) strand; PAM type: YTN; PAM sequence: TTT
cagtctactgacaaaaacac

SEQ ID NO: 79440 - DNA, 20 bp, Artificial Sequence
  Description of Artificial Sequence: Synthetic oligonucleotide
  Target: SCNA; (+) strand; PAM type: YTN; PAM sequence: TTC
agtctactgacaaaaacaca

SEQ ID NO: 79441 - DNA, 20 bp, Artificial Sequence
  Description of Artificial Sequence: Synthetic oligonucleotide
  Target: SCNA; (+) strand; PAM type: YTN; PAM sequence: CTA
ctgacaaaaacacaatttaa

SEQ ID NO: 79442 - DNA, 20 bp, Artificial Sequence
  Description of Artificial Sequence: Synthetic oligonucleotide
  Target: SCNA; (+) strand; PAM type: YTN; PAM sequence: CTG
acaaaaacacaatttaatgt

SEQ ID NO: 79443 - DNA, 20 bp, Artificial Sequence
  Description of Artificial Sequence: Synthetic oligonucleotide
  Target: SCNA; (+) strand; PAM type: YTN; PAM sequence: TTT
aatgtatgatatttattgag

SEQ ID NO: 79444 - DNA, 20 bp, Artificial Sequence
  Description of Artificial Sequence: Synthetic oligonucleotide
  Target: SCNA; (+) strand; PAM type: YTN; PAM sequence: TTA
atgtatgatatttattgaga

SEQ ID NO: 79445 - DNA, 20 bp, Artificial Sequence
  Description of Artificial Sequence: Synthetic oligonucleotide
  Target: SCNA; (+) strand; PAM type: YTN; PAM sequence: TTT
attgagagcatcagcctctc

SEQ ID NO: 79446 - DNA, 20 bp, Artificial Sequence
  Description of Artificial Sequence: Synthetic oligonucleotide
  Target: SCNA; (+) strand; PAM type: YTN; PAM sequence: TTA
ttgagagcatcagcctctct

SEQ ID NO: 79447 - DNA, 20 bp, Artificial Sequence
  Description of Artificial Sequence: Synthetic oligonucleotide
  Target: SCNA; (+) strand; PAM type: YTN; PAM sequence: TTG
agagcatcagcctctctcat

SEQ ID NO: 79448 - DNA, 20 bp, Artificial Sequence
  Description of Artificial Sequence: Synthetic oligonucleotide
  Target: SCNA; (+) strand; PAM type: YTN; PAM sequence: CTC
tctcatttctaagataaatc

SEQ ID NO: 79449 - DNA, 20 bp, Artificial Sequence
  Description of Artificial Sequence: Synthetic oligonucleotide
  Target: SCNA; (+) strand; PAM type: YTN; PAM sequence: CTC
tcatttctaagataaatctc

SEQ ID NO: 79450 - DNA, 20 bp, Artificial Sequence
  Description of Artificial Sequence: Synthetic oligonucleotide
  Target: SCNA; (+) strand; PAM type: YTN; PAM sequence: CTC
atttctaagataaatctctt

SEQ ID NO: 79451 - DNA, 20 bp, Artificial Sequence
  Description of Artificial Sequence: Synthetic oligonucleotide
  Target: SCNA; (+) strand; PAM type: YTN; PAM sequence: TTT
ctaagataaatctctttttt

SEQ ID NO: 79452 - DNA, 20 bp, Artificial Sequence
  Description of Artificial Sequence: Synthetic oligonucleotide
  Target: SCNA; (+) strand; PAM type: YTN; PAM sequence: TTC
taagataaatctcttttttt

SEQ ID NO: 79453 - DNA, 20 bp, Artificial Sequence
  Description of Artificial Sequence: Synthetic oligonucleotide
  Target: SCNA; (+) strand; PAM type: YTN; PAM sequence: CTA
agataaatctctttttttcc

SEQ ID NO: 79454 - DNA, 20 bp, Artificial Sequence
  Description of Artificial Sequence: Synthetic oligonucleotide
  Target: SCNA; (+) strand; PAM type: YTN; PAM sequence: CTC
tttttttccatgatggatat

SEQ ID NO: 79455 - DNA, 20 bp, Artificial Sequence
  Description of Artificial Sequence: Synthetic oligonucleotide
  Target: SCNA; (+) strand; PAM type: YTN; PAM sequence: CTT
tttttccatgatggatatat

SEQ ID NO: 79456 - DNA, 20 bp, Artificial Sequence
  Description of Artificial Sequence: Synthetic oligonucleotide
  Target: SCNA; (+) strand; PAM type: YTN; PAM sequence: TTT
ttttccatgatggatatata

SEQ ID NO: 79457 - DNA, 20 bp, Artificial Sequence
  Description of Artificial Sequence: Synthetic oligonucleotide
  Target: SCNA; (+) strand; PAM type: YTN; PAM sequence: TTT
tttccatgatggatatatac

SEQ ID NO: 79458 - DNA, 20 bp, Artificial Sequence
  Description of Artificial Sequence: Synthetic oligonucleotide
  Target: SCNA; (+) strand; PAM type: YTN; PAM sequence: TTT
ttccatgatggatatatact

SEQ ID NO: 79459 - DNA, 20 bp, Artificial Sequence
  Description of Artificial Sequence: Synthetic oligonucleotide
  Target: SCNA; (+) strand; PAM type: YTN; PAM sequence: TTT
tccatgatggatatatactt

SEQ ID NO: 79460 - DNA, 20 bp, Artificial Sequence
  Description of Artificial Sequence: Synthetic oligonucleotide
  Target: SCNA; (+) strand; PAM type: YTN; PAM sequence: TTT
ccatgatggatatatacttg

SEQ ID NO: 79461 - DNA, 20 bp, Artificial Sequence
  Description of Artificial Sequence: Synthetic oligonucleotide
  Target: SCNA; (+) strand; PAM type: YTN; PAM sequence: TTC
catgatggatatatacttgt

SEQ ID NO: 79462 - DNA, 20 bp, Artificial Sequence
  Description of Artificial Sequence: Synthetic oligonucleotide
  Target: SCNA; (+) strand; PAM type: YTN; PAM sequence: CTT
gtaacaaaccatattgttct

SEQ ID NO: 79463 - DNA, 20 bp, Artificial Sequence
  Description of Artificial Sequence: Synthetic oligonucleotide
  Target: SCNA; (+) strand; PAM type: YTN; PAM sequence: TTG
taacaaaccatattgttctc

SEQ ID NO: 79464 - DNA, 20 bp, Artificial Sequence
  Description of Artificial Sequence: Synthetic oligonucleotide
  Target: SCNA; (+) strand; PAM type: YTN; PAM sequence: TTG
ttctcagagaccacagctgc

SEQ ID NO: 79465 - DNA, 20 bp, Artificial Sequence
  Description of Artificial Sequence: Synthetic oligonucleotide
  Target: SCNA; (+) strand; PAM type: YTN; PAM sequence: TTC
tcagagaccacagctgctcc

SEQ ID NO: 79466 - DNA, 20 bp, Artificial Sequence
  Description of Artificial Sequence: Synthetic oligonucleotide
  Target: SCNA; (+) strand; PAM type: YTN; PAM sequence: CTC
agagaccacagctgctccct

SEQ ID NO: 79467 - DNA, 20 bp, Artificial Sequence
  Description of Artificial Sequence: Synthetic oligonucleotide
  Target: SCNA; (+) strand; PAM type: YTN; PAM sequence: CTG
ctccctttttcccagggtaa

SEQ ID NO: 79468 - DNA, 20 bp, Artificial Sequence
  Description of Artificial Sequence: Synthetic oligonucleotide
  Target: SCNA; (+) strand; PAM type: YTN; PAM sequence: CTC
cctttttcccagggtaaata

SEQ ID NO: 79469 - DNA, 20 bp, Artificial Sequence
  Description of Artificial Sequence: Synthetic oligonucleotide
  Target: SCNA; (+) strand; PAM type: YTN; PAM sequence: CTT
tttcccagggtaaatatgtc

SEQ ID NO: 79470 - DNA, 20 bp, Artificial Sequence
  Description of Artificial Sequence: Synthetic oligonucleotide
  Target: SCNA; (+) strand; PAM type: YTN; PAM sequence: TTT
ttcccagggtaaatatgtca

SEQ ID NO: 79471 - DNA, 20 bp, Artificial Sequence
  Description of Artificial Sequence: Synthetic oligonucleotide
  Target: SCNA; (+) strand; PAM type: YTN; PAM sequence: TTT
tcccagggtaaatatgtcag

SEQ ID NO: 79472 - DNA, 20 bp, Artificial Sequence
  Description of Artificial Sequence: Synthetic oligonucleotide
  Target: SCNA; (+) strand; PAM type: YTN; PAM sequence: TTT
cccagggtaaatatgtcagt

SEQ ID NO: 79473 - DNA, 20 bp, Artificial Sequence
  Description of Artificial Sequence: Synthetic oligonucleotide
  Target: SCNA; (+) strand; PAM type: YTN; PAM sequence: TTC
ccagggtaaatatgtcagtc

SEQ ID NO: 79474 - DNA, 20 bp, Artificial Sequence
  Description of Artificial Sequence: Synthetic oligonucleotide
  Target: SCNA; (+) strand; PAM type: YTN; PAM sequence: CTC
ccggcctgaactgcccattt

SEQ ID NO: 79475 - DNA, 20 bp, Artificial Sequence
  Description of Artificial Sequence: Synthetic oligonucleotide
  Target: SCNA; (+) strand; PAM type: YTN; PAM sequence: CTG
aactgcccatttcttgaagg

SEQ ID NO: 79476 - DNA, 20 bp, Artificial Sequence
  Description of Artificial Sequence: Synthetic oligonucleotide
  Target: SCNA; (+) strand; PAM type: YTN; PAM sequence: CTG
cccatttcttgaaggcagga

SEQ ID NO: 79477 - DNA, 20 bp, Artificial Sequence
  Description of Artificial Sequence: Synthetic oligonucleotide
  Target: SCNA; (+) strand; PAM type: YTN; PAM sequence: TTT
cttgaaggcaggagccaccc

SEQ ID NO: 79478 - DNA, 20 bp, Artificial Sequence
  Description of Artificial Sequence: Synthetic oligonucleotide
  Target: SCNA; (+) strand; PAM type: YTN; PAM sequence: TTC
ttgaaggcaggagccaccca

SEQ ID NO: 79479 - DNA, 20 bp, Artificial Sequence
  Description of Artificial Sequence: Synthetic oligonucleotide
  Target: SCNA; (+) strand; PAM type: YTN; PAM sequence: CTT
gaaggcaggagccacccata

SEQ ID NO: 79480 - DNA, 20 bp, Artificial Sequence
  Description of Artificial Sequence: Synthetic oligonucleotide
  Target: SCNA; (+) strand; PAM type: YTN; PAM sequence: TTG
aaggcaggagccacccatat

SEQ ID NO: 79481 - DNA, 20 bp, Artificial Sequence
  Description of Artificial Sequence: Synthetic oligonucleotide
  Target: SCNA; (+) strand; PAM type: YTN; PAM sequence: TTA
ctcagttttgtatttctcat

SEQ ID NO: 79482 - DNA, 20 bp, Artificial Sequence
  Description of Artificial Sequence: Synthetic oligonucleotide
  Target: SCNA; (+) strand; PAM type: YTN; PAM sequence: CTC
agttttgtatttctcatggt

SEQ ID NO: 79483 - DNA, 20 bp, Artificial Sequence
  Description of Artificial Sequence: Synthetic oligonucleotide
  Target: SCNA; (+) strand; PAM type: YTN; PAM sequence: TTT
tgtatttctcatggtgccca

SEQ ID NO: 79484 - DNA, 20 bp, Artificial Sequence
  Description of Artificial Sequence: Synthetic oligonucleotide
  Target: SCNA; (+) strand; PAM type: YTN; PAM sequence: TTT
gtatttctcatggtgcccag

SEQ ID NO: 79485 - DNA, 20 bp, Artificial Sequence
  Description of Artificial Sequence: Synthetic oligonucleotide
  Target: SCNA; (+) strand; PAM type: YTN; PAM sequence: TTG
tatttctcatggtgcccagc

SEQ ID NO: 79486 - DNA, 20 bp, Artificial Sequence
  Description of Artificial Sequence: Synthetic oligonucleotide
  Target: SCNA; (+) strand; PAM type: YTN; PAM sequence: TTT
ctcatggtgcccagctgagt

SEQ ID NO: 79487 - DNA, 20 bp, Artificial Sequence
  Description of Artificial Sequence: Synthetic oligonucleotide
  Target: SCNA; (+) strand; PAM type: YTN; PAM sequence: TTC
tcatggtgcccagctgagtg

SEQ ID NO: 79488 - DNA, 20 bp, Artificial Sequence
  Description of Artificial Sequence: Synthetic oligonucleotide
  Target: SCNA; (+) strand; PAM type: YTN; PAM sequence: CTC
atggtgcccagctgagtgtc

SEQ ID NO: 79489 - DNA, 20 bp, Artificial Sequence
  Description of Artificial Sequence: Synthetic oligonucleotide
  Target: SCNA; (+) strand; PAM type: YTN; PAM sequence: CTG
agtgtctggcacatattaag

SEQ ID NO: 79490 - DNA, 20 bp, Artificial Sequence
  Description of Artificial Sequence: Synthetic oligonucleotide
  Target: SCNA; (+) strand; PAM type: YTN; PAM sequence: CTG
gcacatattaagtactcagt

SEQ ID NO: 79491 - DNA, 20 bp, Artificial Sequence
  Description of Artificial Sequence: Synthetic oligonucleotide
  Target: SCNA; (+) strand; PAM type: YTN; PAM sequence: TTA
agtactcagttaatgatttt

SEQ ID NO: 79492 - DNA, 20 bp, Artificial Sequence
  Description of Artificial Sequence: Synthetic oligonucleotide
  Target: SCNA; (+) strand; PAM type: YTN; PAM sequence: CTC
agttaatgatttttaatgaa

SEQ ID NO: 79493 - DNA, 20 bp, Artificial Sequence
  Description of Artificial Sequence: Synthetic oligonucleotide
  Target: SCNA; (+) strand; PAM type: YTN; PAM sequence: TTA
atgatttttaatgaaaacat

SEQ ID NO: 79494 - DNA, 20 bp, Artificial Sequence
  Description of Artificial Sequence: Synthetic oligonucleotide
  Target: SCNA; (+) strand; PAM type: YTN; PAM sequence: TTT
ttaatgaaaacatagcagta

SEQ ID NO: 79495 - DNA, 20 bp, Artificial Sequence
  Description of Artificial Sequence: Synthetic oligonucleotide
  Target: SCNA; (+) strand; PAM type: YTN; PAM sequence: TTT
taatgaaaacatagcagtaa

SEQ ID NO: 79496 - DNA, 20 bp, Artificial Sequence
  Description of Artificial Sequence: Synthetic oligonucleotide
  Target: SCNA; (+) strand; PAM type: YTN; PAM sequence: TTT
aatgaaaacatagcagtaag

SEQ ID NO: 79497 - DNA, 20 bp, Artificial Sequence
  Description of Artificial Sequence: Synthetic oligonucleotide
  Target: SCNA; (+) strand; PAM type: YTN; PAM sequence: TTA
atgaaaacatagcagtaagc

SEQ ID NO: 79498 - DNA, 20 bp, Artificial Sequence
  Description of Artificial Sequence: Synthetic oligonucleotide
  Target: SCNA; (+) strand; PAM type: YTN; PAM sequence: CTA
ttttccttataattttatac

SEQ ID NO: 79499 - DNA, 20 bp, Artificial Sequence
  Description of Artificial Sequence: Synthetic oligonucleotide
  Target: SCNA; (+) strand; PAM type: YTN; PAM sequence: TTT
tccttataattttatacata

SEQ ID NO: 79500 - DNA, 20 bp, Artificial Sequence
  Description of Artificial Sequence: Synthetic oligonucleotide
  Target: SCNA; (+) strand; PAM type: YTN; PAM sequence: TTT
ccttataattttatacataa

SEQ ID NO: 79501 - DNA, 20 bp, Artificial Sequence
  Description of Artificial Sequence: Synthetic oligonucleotide
  Target: SCNA; (+) strand; PAM type: YTN; PAM sequence: TTC
cttataattttatacataat

SEQ ID NO: 79502 - DNA, 20 bp, Artificial Sequence
  Description of Artificial Sequence: Synthetic oligonucleotide
  Target: SCNA; (+) strand; PAM type: YTN; PAM sequence: CTT
ataattttatacataattac

SEQ ID NO: 79503 - DNA, 20 bp, Artificial Sequence
  Description of Artificial Sequence: Synthetic oligonucleotide
  Target: SCNA; (+) strand; PAM type: YTN; PAM sequence: TTA
taattttatacataattaca

SEQ ID NO: 79504 - DNA, 20 bp, Artificial Sequence
  Description of Artificial Sequence: Synthetic oligonucleotide
  Target: SCNA; (+) strand; PAM type: YTN; PAM sequence: TTT
tatacataattacagagtac

SEQ ID NO: 79505 - DNA, 20 bp, Artificial Sequence
  Description of Artificial Sequence: Synthetic oligonucleotide
  Target: SCNA; (+) strand; PAM type: YTN; PAM sequence: TTT
atacataattacagagtact

SEQ ID NO: 79506 - DNA, 20 bp, Artificial Sequence
  Description of Artificial Sequence: Synthetic oligonucleotide
  Target: SCNA; (+) strand; PAM type: YTN; PAM sequence: TTA
tacataattacagagtactt

SEQ ID NO: 79507 - DNA, 20 bp, Artificial Sequence
  Description of Artificial Sequence: Synthetic oligonucleotide
  Target: SCNA; (+) strand; PAM type: YTN; PAM sequence: TTA
cagagtactttcccacctag

SEQ ID NO: 79508 - DNA, 20 bp, Artificial Sequence
  Description of Artificial Sequence: Synthetic oligonucleotide
  Target: SCNA; (+) strand; PAM type: YTN; PAM sequence: CTT
tcccacctagaaccttacag

SEQ ID NO: 79509 - DNA, 20 bp, Artificial Sequence
  Description of Artificial Sequence: Synthetic oligonucleotide
  Target: SCNA; (+) strand; PAM type: YTN; PAM sequence: TTT
cccacctagaaccttacagg

SEQ ID NO: 79510 - DNA, 20 bp, Artificial Sequence
  Description of Artificial Sequence: Synthetic oligonucleotide
  Target: SCNA; (+) strand; PAM type: YTN; PAM sequence: TTC
ccacctagaaccttacagga

SEQ ID NO: 79511 - DNA, 20 bp, Artificial Sequence
  Description of Artificial Sequence: Synthetic oligonucleotide
  Target: SCNA; (+) strand; PAM type: YTN; PAM sequence: CTA
gaaccttacaggattaaggg

SEQ ID NO: 79512 - DNA, 20 bp, Artificial Sequence
  Description of Artificial Sequence: Synthetic oligonucleotide
  Target: SCNA; (+) strand; PAM type: YTN; PAM sequence: CTT
acaggattaagggtcattag

SEQ ID NO: 79513 - DNA, 20 bp, Artificial Sequence
  Description of Artificial Sequence: Synthetic oligonucleotide
  Target: SCNA; (+) strand; PAM type: YTN; PAM sequence: TTA
caggattaagggtcattaga

SEQ ID NO: 79514 - DNA, 20 bp, Artificial Sequence
  Description of Artificial Sequence: Synthetic oligonucleotide
  Target: SCNA; (+) strand; PAM type: YTN; PAM sequence: TTA
agggtcattagaattcacta

SEQ ID NO: 79515 - DNA, 20 bp, Artificial Sequence
  Description of Artificial Sequence: Synthetic oligonucleotide
  Target: SCNA; (+) strand; PAM type: YTN; PAM sequence: TTA
gaattcactattcatccatc

SEQ ID NO: 79516 - DNA, 20 bp, Artificial Sequence
  Description of Artificial Sequence: Synthetic oligonucleotide
  Target: SCNA; (+) strand; PAM type: YTN; PAM sequence: TTC
actattcatccatcttgaac

SEQ ID NO: 79517 - DNA, 20 bp, Artificial Sequence
  Description of Artificial Sequence: Synthetic oligonucleotide
  Target: SCNA; (+) strand; PAM type: YTN; PAM sequence: CTA
ttcatccatcttgaacccag

SEQ ID NO: 79518 - DNA, 20 bp, Artificial Sequence
  Description of Artificial Sequence: Synthetic oligonucleotide
  Target: SCNA; (+) strand; PAM type: YTN; PAM sequence: TTC
atccatcttgaacccagtga

SEQ ID NO: 79519 - DNA, 20 bp, Artificial Sequence
  Description of Artificial Sequence: Synthetic oligonucleotide
  Target: SCNA; (+) strand; PAM type: YTN; PAM sequence: CTT
gaacccagtgaaattttgtc

SEQ ID NO: 79520 - DNA, 20 bp, Artificial Sequence
  Description of Artificial Sequence: Synthetic oligonucleotide
  Target: SCNA; (+) strand; PAM type: YTN; PAM sequence: TTG
aacccagtgaaattttgtca

SEQ ID NO: 79521 - DNA, 20 bp, Artificial Sequence
  Description of Artificial Sequence: Synthetic oligonucleotide
  Target: SCNA; (+) strand; PAM type: YTN; PAM sequence: TTT
tgtcagatacaaagaaaggc

SEQ ID NO: 79522 - DNA, 20 bp, Artificial Sequence
  Description of Artificial Sequence: Synthetic oligonucleotide
  Target: SCNA; (+) strand; PAM type: YTN; PAM sequence: TTT
gtcagatacaaagaaaggcc

SEQ ID NO: 79523 - DNA, 20 bp, Artificial Sequence
  Description of Artificial Sequence: Synthetic oligonucleotide
  Target: SCNA; (+) strand; PAM type: YTN; PAM sequence: TTG
tcagatacaaagaaaggcca

SEQ ID NO: 79524 - DNA, 20 bp, Artificial Sequence
  Description of Artificial Sequence: Synthetic oligonucleotide
  Target: SCNA; (+) strand; PAM type: YTN; PAM sequence: TTG
tgtttctaagtggggacagt

SEQ ID NO: 79525 - DNA, 20 bp, Artificial Sequence
  Description of Artificial Sequence: Synthetic oligonucleotide
  Target: SCNA; (+) strand; PAM type: YTN; PAM sequence: TTT
ctaagtggggacagtttatg

SEQ ID NO: 79526 - DNA, 20 bp, Artificial Sequence
  Description of Artificial Sequence: Synthetic oligonucleotide
  Target: SCNA; (+) strand; PAM type: YTN; PAM sequence: TTC
taagtggggacagtttatgt

SEQ ID NO: 79527 - DNA, 20 bp, Artificial Sequence
  Description of Artificial Sequence: Synthetic oligonucleotide
  Target: SCNA; (+) strand; PAM type: YTN; PAM sequence: CTA
agtggggacagtttatgtac

SEQ ID NO: 79528 - DNA, 20 bp, Artificial Sequence
  Description of Artificial Sequence: Synthetic oligonucleotide
  Target: SCNA; (+) strand; PAM type: YTN; PAM sequence: TTT
atgtaccattagtgggctct

SEQ ID NO: 79529 - DNA, 20 bp, Artificial Sequence
  Description of Artificial Sequence: Synthetic oligonucleotide
  Target: SCNA; (+) strand; PAM type: YTN; PAM sequence: TTA
tgtaccattagtgggctctc

SEQ ID NO: 79530 - DNA, 20 bp, Artificial Sequence
  Description of Artificial Sequence: Synthetic oligonucleotide
  Target: SCNA; (+) strand; PAM type: YTN; PAM sequence: TTA
gtgggctctcatatgagtga

SEQ ID NO: 79531 - DNA, 20 bp, Artificial Sequence
  Description of Artificial Sequence: Synthetic oligonucleotide
  Target: SCNA; (+) strand; PAM type: YTN; PAM sequence: CTC
tcatatgagtgagaaatacc

SEQ ID NO: 79532 - DNA, 20 bp, Artificial Sequence
  Description of Artificial Sequence: Synthetic oligonucleotide
  Target: SCNA; (+) strand; PAM type: YTN; PAM sequence: CTC
atatgagtgagaaataccaa

SEQ ID NO: 79533 - DNA, 20 bp, Artificial Sequence
  Description of Artificial Sequence: Synthetic oligonucleotide
  Target: SCNA; (+) strand; PAM type: YTN; PAM sequence: CTT
ttacataccacattgcaaaa

SEQ ID NO: 79534 - DNA, 20 bp, Artificial Sequence
  Description of Artificial Sequence: Synthetic oligonucleotide
  Target: SCNA; (+) strand; PAM type: YTN; PAM sequence: TTT
tacataccacattgcaaaat

SEQ ID NO: 79535 - DNA, 20 bp, Artificial Sequence
  Description of Artificial Sequence: Synthetic oligonucleotide
  Target: SCNA; (+) strand; PAM type: YTN; PAM sequence: TTT
acataccacattgcaaaatg

SEQ ID NO: 79536 - DNA, 20 bp, Artificial Sequence
  Description of Artificial Sequence: Synthetic oligonucleotide
  Target: SCNA; (+) strand; PAM type: YTN; PAM sequence: TTA
cataccacattgcaaaatgt

SEQ ID NO: 79537 - DNA, 20 bp, Artificial Sequence
  Description of Artificial Sequence: Synthetic oligonucleotide
  Target: SCNA; (+) strand; PAM type: YTN; PAM sequence: TTG
caaaatgtcactgttacata

SEQ ID NO: 79538 - DNA, 20 bp, Artificial Sequence
  Description of Artificial Sequence: Synthetic oligonucleotide
  Target: SCNA; (+) strand; PAM type: YTN; PAM sequence: CTG
ttacatacctttagaaacaa

SEQ ID NO: 79539 - DNA, 20 bp, Artificial Sequence
  Description of Artificial Sequence: Synthetic oligonucleotide
  Target: SCNA; (+) strand; PAM type: YTN; PAM sequence: TTA
catacctttagaaacaaatc

SEQ ID NO: 79540 - DNA, 20 bp, Artificial Sequence
  Description of Artificial Sequence: Synthetic oligonucleotide
  Target: SCNA; (+) strand; PAM type: YTN; PAM sequence: CTT
tagaaacaaatcaatcttaa

SEQ ID NO: 79541 - DNA, 20 bp, Artificial Sequence
  Description of Artificial Sequence: Synthetic oligonucleotide
  Target: SCNA; (+) strand; PAM type: YTN; PAM sequence: TTT
agaaacaaatcaatcttaaa

SEQ ID NO: 79542 - DNA, 20 bp, Artificial Sequence
  Description of Artificial Sequence: Synthetic oligonucleotide
  Target: SCNA; (+) strand; PAM type: YTN; PAM sequence: TTA
gaaacaaatcaatcttaaat

SEQ ID NO: 79543 - DNA, 20 bp, Artificial Sequence
  Description of Artificial Sequence: Synthetic oligonucleotide
  Target: SCNA; (+) strand; PAM type: YTN; PAM sequence: CTT
aaatttttctttaataatca

SEQ ID NO: 79544 - DNA, 20 bp, Artificial Sequence
  Description of Artificial Sequence: Synthetic oligonucleotide
  Target: SCNA; (+) strand; PAM type: YTN; PAM sequence: TTA
aatttttctttaataatcac

SEQ ID NO: 79545 - DNA, 20 bp, Artificial Sequence
  Description of Artificial Sequence: Synthetic oligonucleotide
  Target: SCNA; (+) strand; PAM type: YTN; PAM sequence: TTT
ttctttaataatcacagtat

SEQ ID NO: 79546 - DNA, 20 bp, Artificial Sequence
  Description of Artificial Sequence: Synthetic oligonucleotide
  Target: SCNA; (+) strand; PAM type: YTN; PAM sequence: TTT
tctttaataatcacagtatg

SEQ ID NO: 79547 - DNA, 20 bp, Artificial Sequence
  Description of Artificial Sequence: Synthetic oligonucleotide
  Target: SCNA; (+) strand; PAM type: YTN; PAM sequence: TTT
ctttaataatcacagtatgc

SEQ ID NO: 79548 - DNA, 20 bp, Artificial Sequence
  Description of Artificial Sequence: Synthetic oligonucleotide
  Target: SCNA; (+) strand; PAM type: YTN; PAM sequence: TTC
tttaataatcacagtatgct

SEQ ID NO: 79549 - DNA, 20 bp, Artificial Sequence
  Description of Artificial Sequence: Synthetic oligonucleotide
  Target: SCNA; (+) strand; PAM type: YTN; PAM sequence: CTT
taataatcacagtatgcttt

SEQ ID NO: 79550 - DNA, 20 bp, Artificial Sequence
  Description of Artificial Sequence: Synthetic oligonucleotide
  Target: SCNA; (+) strand; PAM type: YTN; PAM sequence: TTT
aataatcacagtatgcttta

SEQ ID NO: 79551 - DNA, 20 bp, Artificial Sequence
  Description of Artificial Sequence: Synthetic oligonucleotide
  Target: SCNA; (+) strand; PAM type: YTN; PAM sequence: TTA
ataatcacagtatgctttaa

SEQ ID NO: 79552 - DNA, 20 bp, Artificial Sequence
  Description of Artificial Sequence: Synthetic oligonucleotide
  Target: SCNA; (+) strand; PAM type: YTN; PAM sequence: CTT
taatctaagattatagtgcc

SEQ ID NO: 79553 - DNA, 20 bp, Artificial Sequence
  Description of Artificial Sequence: Synthetic oligonucleotide
  Target: SCNA; (+) strand; PAM type: YTN; PAM sequence: TTT
aatctaagattatagtgcca

SEQ ID NO: 79554 - DNA, 20 bp, Artificial Sequence
  Description of Artificial Sequence: Synthetic oligonucleotide
  Target: SCNA; (+) strand; PAM type: YTN; PAM sequence: TTA
atctaagattatagtgccag

SEQ ID NO: 79555 - DNA, 20 bp, Artificial Sequence
  Description of Artificial Sequence: Synthetic oligonucleotide
  Target: SCNA; (+) strand; PAM type: YTN; PAM sequence: CTA
agattatagtgccagtaata

SEQ ID NO: 79556 - DNA, 20 bp, Artificial Sequence
  Description of Artificial Sequence: Synthetic oligonucleotide
  Target: SCNA; (+) strand; PAM type: YTN; PAM sequence: TTA
tagtgccagtaatagtatat

SEQ ID NO: 79557 - DNA, 20 bp, Artificial Sequence
  Description of Artificial Sequence: Synthetic oligonucleotide
  Target: SCNA; (+) strand; PAM type: YTN; PAM sequence: CTC
gaaacacaaatacaaatcag

SEQ ID NO: 79558 - DNA, 20 bp, Artificial Sequence
  Description of Artificial Sequence: Synthetic oligonucleotide
  Target: SCNA; (+) strand; PAM type: YTN; PAM sequence: TTC
attgtgtctcaaagctttta

SEQ ID NO: 79559 - DNA, 20 bp, Artificial Sequence
  Description of Artificial Sequence: Synthetic oligonucleotide
  Target: SCNA; (+) strand; PAM type: YTN; PAM sequence: TTG
tgtctcaaagcttttaattt

SEQ ID NO: 79560 - DNA, 20 bp, Artificial Sequence
  Description of Artificial Sequence: Synthetic oligonucleotide
  Target: SCNA; (+) strand; PAM type: YTN; PAM sequence: CTC
aaagcttttaatttaggtct

SEQ ID NO: 79561 - DNA, 20 bp, Artificial Sequence
  Description of Artificial Sequence: Synthetic oligonucleotide
  Target: SCNA; (+) strand; PAM type: YTN; PAM sequence: CTT
ttaatttaggtctaaatata

SEQ ID NO: 79562 - DNA, 20 bp, Artificial Sequence
  Description of Artificial Sequence: Synthetic oligonucleotide
  Target: SCNA; (+) strand; PAM type: YTN; PAM sequence: TTT
taatttaggtctaaatatac

SEQ ID NO: 79563 - DNA, 20 bp, Artificial Sequence
  Description of Artificial Sequence: Synthetic oligonucleotide
  Target: SCNA; (+) strand; PAM type: YTN; PAM sequence: TTT
aatttaggtctaaatatacc

SEQ ID NO: 79564 - DNA, 20 bp, Artificial Sequence
  Description of Artificial Sequence: Synthetic oligonucleotide
  Target: SCNA; (+) strand; PAM type: YTN; PAM sequence: TTA
atttaggtctaaatatacct

SEQ ID NO: 79565 - DNA, 20 bp, Artificial Sequence
  Description of Artificial Sequence: Synthetic oligonucleotide
  Target: SCNA; (+) strand; PAM type: YTN; PAM sequence: TTT
aggtctaaatatacctaata

SEQ ID NO: 79566 - DNA, 20 bp, Artificial Sequence
  Description of Artificial Sequence: Synthetic oligonucleotide
  Target: SCNA; (+) strand; PAM type: YTN; PAM sequence: TTA
ggtctaaatatacctaatag

SEQ ID NO: 79567 - DNA, 20 bp, Artificial Sequence
  Description of Artificial Sequence: Synthetic oligonucleotide
  Target: SCNA; (+) strand; PAM type: YTN; PAM sequence: CTA
aatatacctaatagtcatct

SEQ ID NO: 79568 - DNA, 20 bp, Artificial Sequence
  Description of Artificial Sequence: Synthetic oligonucleotide
  Target: SCNA; (+) strand; PAM type: YTN; PAM sequence: CTA
atagtcatctggttatcttc

SEQ ID NO: 79569 - DNA, 20 bp, Artificial Sequence
  Description of Artificial Sequence: Synthetic oligonucleotide
  Target: SCNA; (+) strand; PAM type: YTN; PAM sequence: CTG
gttatcttctgaagtcaagc

SEQ ID NO: 79570 - DNA, 20 bp, Artificial Sequence
  Description of Artificial Sequence: Synthetic oligonucleotide
  Target: SCNA; (+) strand; PAM type: YTN; PAM sequence: TTA
tcttctgaagtcaagcacaa

SEQ ID NO: 79571 - DNA, 20 bp, Artificial Sequence
  Description of Artificial Sequence: Synthetic oligonucleotide
  Target: SCNA; (+) strand; PAM type: YTN; PAM sequence: CTT
ctgaagtcaagcacaaggac

SEQ ID NO: 79572 - DNA, 20 bp, Artificial Sequence
  Description of Artificial Sequence: Synthetic oligonucleotide
  Target: SCNA; (+) strand; PAM type: YTN; PAM sequence: TTC
tgaagtcaagcacaaggaca

SEQ ID NO: 79573 - DNA, 20 bp, Artificial Sequence
  Description of Artificial Sequence: Synthetic oligonucleotide
  Target: SCNA; (+) strand; PAM type: YTN; PAM sequence: CTG
aagtcaagcacaaggacaag

SEQ ID NO: 79574 - DNA, 20 bp, Artificial Sequence
  Description of Artificial Sequence: Synthetic oligonucleotide
  Target: SCNA; (+) strand; PAM type: YTN; PAM sequence: CTT
ttaattatttgaggcaatgt

SEQ ID NO: 79575 - DNA, 20 bp, Artificial Sequence
  Description of Artificial Sequence: Synthetic oligonucleotide
  Target: SCNA; (+) strand; PAM type: YTN; PAM sequence: TTT
taattatttgaggcaatgta

SEQ ID NO: 79576 - DNA, 20 bp, Artificial Sequence
  Description of Artificial Sequence: Synthetic oligonucleotide
  Target: SCNA; (+) strand; PAM type: YTN; PAM sequence: TTT
aattatttgaggcaatgtat

SEQ ID NO: 79577 - DNA, 20 bp, Artificial Sequence
  Description of Artificial Sequence: Synthetic oligonucleotide
  Target: SCNA; (+) strand; PAM type: YTN; PAM sequence: TTA
attatttgaggcaatgtatt

SEQ ID NO: 79578 - DNA, 20 bp, Artificial Sequence
  Description of Artificial Sequence: Synthetic oligonucleotide
  Target: SCNA; (+) strand; PAM type: YTN; PAM sequence: TTA
tttgaggcaatgtattatat

SEQ ID NO: 79579 - DNA, 20 bp, Artificial Sequence
  Description of Artificial Sequence: Synthetic oligonucleotide
  Target: SCNA; (+) strand; PAM type: YTN; PAM sequence: TTT
gaggcaatgtattatattaa

SEQ ID NO: 79580 - DNA, 20 bp, Artificial Sequence
  Description of Artificial Sequence: Synthetic oligonucleotide
  Target: SCNA; (+) strand; PAM type: YTN; PAM sequence: TTG
aggcaatgtattatattaac

SEQ ID NO: 79581 - DNA, 20 bp, Artificial Sequence
  Description of Artificial Sequence: Synthetic oligonucleotide
  Target: SCNA; (+) strand; PAM type: YTN; PAM sequence: TTA
tattaacaattattagacac

SEQ ID NO: 79582 - DNA, 20 bp, Artificial Sequence
  Description of Artificial Sequence: Synthetic oligonucleotide
  Target: SCNA; (+) strand; PAM type: YTN; PAM sequence: TTA
acaattattagacacttaag

SEQ ID NO: 79583 - DNA, 20 bp, Artificial Sequence
  Description of Artificial Sequence: Synthetic oligonucleotide
  Target: SCNA; (+) strand; PAM type: YTN; PAM sequence: TTA
ttagacacttaaggggaaag

SEQ ID NO: 79584 - DNA, 20 bp, Artificial Sequence
  Description of Artificial Sequence: Synthetic oligonucleotide
  Target: SCNA; (+) strand; PAM type: YTN; PAM sequence: TTA
gacacttaaggggaaagctt

SEQ ID NO: 79585 - DNA, 20 bp, Artificial Sequence
  Description of Artificial Sequence: Synthetic oligonucleotide
  Target: SCNA; (+) strand; PAM type: YTN; PAM sequence: CTT
aaggggaaagcttactataa

SEQ ID NO: 79586 - DNA, 20 bp, Artificial Sequence
  Description of Artificial Sequence: Synthetic oligonucleotide
  Target: SCNA; (+) strand; PAM type: YTN; PAM sequence: TTA
aggggaaagcttactataaa

SEQ ID NO: 79587 - DNA, 20 bp, Artificial Sequence
  Description of Artificial Sequence: Synthetic oligonucleotide
  Target: SCNA; (+) strand; PAM type: YTN; PAM sequence: CTT
actataaattaaaatatttc

SEQ ID NO: 79588 - DNA, 20 bp, Artificial Sequence
  Description of Artificial Sequence: Synthetic oligonucleotide
  Target: SCNA; (+) strand; PAM type: YTN; PAM sequence: TTA
ctataaattaaaatatttct

SEQ ID NO: 79589 - DNA, 20 bp, Artificial Sequence
  Description of Artificial Sequence: Synthetic oligonucleotide
  Target: SCNA; (+) strand; PAM type: YTN; PAM sequence: CTA
taaattaaaatatttctcca

SEQ ID NO: 79590 - DNA, 20 bp, Artificial Sequence
  Description of Artificial Sequence: Synthetic oligonucleotide
  Target: SCNA; (+) strand; PAM type: YTN; PAM sequence: TTA
aaatatttctccagtcctga

SEQ ID NO: 79591 - DNA, 20 bp, Artificial Sequence
  Description of Artificial Sequence: Synthetic oligonucleotide
  Target: SCNA; (+) strand; PAM type: YTN; PAM sequence: TTT
ctccagtcctgacatctctt

SEQ ID NO: 79592 - DNA, 20 bp, Artificial Sequence
  Description of Artificial Sequence: Synthetic oligonucleotide
  Target: SCNA; (+) strand; PAM type: YTN; PAM sequence: TTC
tccagtcctgacatctctta

SEQ ID NO: 79593 - DNA, 20 bp, Artificial Sequence
  Description of Artificial Sequence: Synthetic oligonucleotide
  Target: SCNA; (+) strand; PAM type: YTN; PAM sequence: CTC
cagtcctgacatctcttatt

SEQ ID NO: 79594 - DNA, 20 bp, Artificial Sequence
  Description of Artificial Sequence: Synthetic oligonucleotide
  Target: SCNA; (+) strand; PAM type: YTN; PAM sequence: CTG
acatctcttattactacctt

SEQ ID NO: 79595 - DNA, 20 bp, Artificial Sequence
  Description of Artificial Sequence: Synthetic oligonucleotide
  Target: SCNA; (+) strand; PAM type: YTN; PAM sequence: CTC
ttattactaccttgttataa

SEQ ID NO: 79596 - DNA, 20 bp, Artificial Sequence
  Description of Artificial Sequence: Synthetic oligonucleotide
  Target: SCNA; (+) strand; PAM type: YTN; PAM sequence: CTT
attactaccttgttataaaa

SEQ ID NO: 79597 - DNA, 20 bp, Artificial Sequence
  Description of Artificial Sequence: Synthetic oligonucleotide
  Target: SCNA; (+) strand; PAM type: YTN; PAM sequence: TTA
ttactaccttgttataaaat

SEQ ID NO: 79598 - DNA, 20 bp, Artificial Sequence
  Description of Artificial Sequence: Synthetic oligonucleotide
  Target: SCNA; (+) strand; PAM type: YTN; PAM sequence: TTA
ctaccttgttataaaattat

SEQ ID NO: 79599 - DNA, 20 bp, Artificial Sequence
  Description of Artificial Sequence: Synthetic oligonucleotide
  Target: SCNA; (+) strand; PAM type: YTN; PAM sequence: CTA
ccttgttataaaattatttt

SEQ ID NO: 79600 - DNA, 20 bp, Artificial Sequence
  Description of Artificial Sequence: Synthetic oligonucleotide
  Target: SCNA; (+) strand; PAM type: YTN; PAM sequence: CTT
gttataaaattattttaaga

SEQ ID NO: 79601 - DNA, 20 bp, Artificial Sequence
  Description of Artificial Sequence: Synthetic oligonucleotide
  Target: SCNA; (+) strand; PAM type: YTN; PAM sequence: TTG
ttataaaattattttaagat

SEQ ID NO: 79602 - DNA, 20 bp, Artificial Sequence
  Description of Artificial Sequence: Synthetic oligonucleotide
  Target: SCNA; (+) strand; PAM type: YTN; PAM sequence: TTA
taaaattattttaagattat

SEQ ID NO: 79603 - DNA, 20 bp, Artificial Sequence
  Description of Artificial Sequence: Synthetic oligonucleotide
  Target: SCNA; (+) strand; PAM type: YTN; PAM sequence: TTA
ttttaagattatgcctgtga

SEQ ID NO: 79604 - DNA, 20 bp, Artificial Sequence
  Description of Artificial Sequence: Synthetic oligonucleotide
  Target: SCNA; (+) strand; PAM type: YTN; PAM sequence: TTT
taagattatgcctgtgacct

SEQ ID NO: 79605 - DNA, 20 bp, Artificial Sequence
  Description of Artificial Sequence: Synthetic oligonucleotide
  Target: SCNA; (+) strand; PAM type: YTN; PAM sequence: TTT
aagattatgcctgtgacctg

SEQ ID NO: 79606 - DNA, 20 bp, Artificial Sequence
  Description of Artificial Sequence: Synthetic oligonucleotide
  Target: SCNA; (+) strand; PAM type: YTN; PAM sequence: TTA
agattatgcctgtgacctgt

SEQ ID NO: 79607 - DNA, 20 bp, Artificial Sequence
  Description of Artificial Sequence: Synthetic oligonucleotide
  Target: SCNA; (+) strand; PAM type: YTN; PAM sequence: TTA
tgcctgtgacctgtgtgtgc

SEQ ID NO: 79608 - DNA, 20 bp, Artificial Sequence
  Description of Artificial Sequence: Synthetic oligonucleotide
  Target: SCNA; (+) strand; PAM type: YTN; PAM sequence: CTG
tgacctgtgtgtgcttcttc

SEQ ID NO: 79609 - DNA, 20 bp, Artificial Sequence
  Description of Artificial Sequence: Synthetic oligonucleotide
  Target: SCNA; (+) strand; PAM type: YTN; PAM sequence: CTG
tgtgtgcttcttcaaagaaa

SEQ ID NO: 79610 - DNA, 20 bp, Artificial Sequence
  Description of Artificial Sequence: Synthetic oligonucleotide
  Target: SCNA; (+) strand; PAM type: YTN; PAM sequence: CTT
cttcaaagaaatctgaaatg

SEQ ID NO: 79611 - DNA, 20 bp, Artificial Sequence
  Description of Artificial Sequence: Synthetic oligonucleotide
  Target: SCNA; (+) strand; PAM type: YTN; PAM sequence: TTC
ttcaaagaaatctgaaatgt

SEQ ID NO: 79612 - DNA, 20 bp, Artificial Sequence
  Description of Artificial Sequence: Synthetic oligonucleotide
  Target: SCNA; (+) strand; PAM type: YTN; PAM sequence: CTT
caaagaaatctgaaatgttg

SEQ ID NO: 79613 - DNA, 20 bp, Artificial Sequence
  Description of Artificial Sequence: Synthetic oligonucleotide
  Target: SCNA; (+) strand; PAM type: YTN; PAM sequence: TTC
aaagaaatctgaaatgttgc

SEQ ID NO: 79614 - DNA, 20 bp, Artificial Sequence
  Description of Artificial Sequence: Synthetic oligonucleotide
  Target: SCNA; (+) strand; PAM type: YTN; PAM sequence: CTG
aaatgttgcctgtgacctgt

SEQ ID NO: 79615 - DNA, 20 bp, Artificial Sequence
  Description of Artificial Sequence: Synthetic oligonucleotide
  Target: SCNA; (+) strand; PAM type: YTN; PAM sequence: TTG
cctgtgacctgtgcttgttt

SEQ ID NO: 79616 - DNA, 20 bp, Artificial Sequence
  Description of Artificial Sequence: Synthetic oligonucleotide
  Target: SCNA; (+) strand; PAM type: YTN; PAM sequence: CTG
tgacctgtgcttgtttgtga

SEQ ID NO: 79617 - DNA, 20 bp, Artificial Sequence
  Description of Artificial Sequence: Synthetic oligonucleotide
  Target: SCNA; (+) strand; PAM type: YTN; PAM sequence: CTG
tgcttgtttgtgaaatcaac

SEQ ID NO: 79618 - DNA, 20 bp, Artificial Sequence
  Description of Artificial Sequence: Synthetic oligonucleotide
  Target: SCNA; (+) strand; PAM type: YTN; PAM sequence: CTT
gtttgtgaaatcaacattaa

SEQ ID NO: 79619 - DNA, 20 bp, Artificial Sequence
  Description of Artificial Sequence: Synthetic oligonucleotide
  Target: SCNA; (+) strand; PAM type: YTN; PAM sequence: TTG
tttgtgaaatcaacattaaa

SEQ ID NO: 79620 - DNA, 20 bp, Artificial Sequence
  Description of Artificial Sequence: Synthetic oligonucleotide
  Target: SCNA; (+) strand; PAM type: YTN; PAM sequence: TTT
gtgaaatcaacattaaatga

SEQ ID NO: 79621 - DNA, 20 bp, Artificial Sequence
  Description of Artificial Sequence: Synthetic oligonucleotide
  Target: SCNA; (+) strand; PAM type: YTN; PAM sequence: TTG
tgaaatcaacattaaatgat

SEQ ID NO: 79622 - DNA, 20 bp, Artificial Sequence
  Description of Artificial Sequence: Synthetic oligonucleotide
  Target: SCNA; (+) strand; PAM type: YTN; PAM sequence: TTA
aatgattcagctgatggcaa

SEQ ID NO: 79623 - DNA, 20 bp, Artificial Sequence
  Description of Artificial Sequence: Synthetic oligonucleotide
  Target: SCNA; (+) strand; PAM type: YTN; PAM sequence: TTC
agctgatggcaacatacatc

SEQ ID NO: 79624 - DNA, 20 bp, Artificial Sequence
  Description of Artificial Sequence: Synthetic oligonucleotide
  Target: SCNA; (+) strand; PAM type: YTN; PAM sequence: CTG
atggcaacatacatcatctg

SEQ ID NO: 79625 - DNA, 20 bp, Artificial Sequence
  Description of Artificial Sequence: Synthetic oligonucleotide
  Target: SCNA; (+) strand; PAM type: YTN; PAM sequence: CTG
attaatcatttaatcagagg

SEQ ID NO: 79626 - DNA, 20 bp, Artificial Sequence
  Description of Artificial Sequence: Synthetic oligonucleotide
  Target: SCNA; (+) strand; PAM type: YTN; PAM sequence: TTA
atcatttaatcagagggtcc

SEQ ID NO: 79627 - DNA, 20 bp, Artificial Sequence
  Description of Artificial Sequence: Synthetic oligonucleotide
  Target: SCNA; (+) strand; PAM type: YTN; PAM sequence: TTT
aatcagagggtccataacac

SEQ ID NO: 79628 - DNA, 20 bp, Artificial Sequence
  Description of Artificial Sequence: Synthetic oligonucleotide
  Target: SCNA; (+) strand; PAM type: YTN; PAM sequence: TTA
atcagagggtccataacact

SEQ ID NO: 79629 - DNA, 20 bp, Artificial Sequence
  Description of Artificial Sequence: Synthetic oligonucleotide
  Target: SCNA; (+) strand; PAM type: YTN; PAM sequence: CTC
aagtgtttaaaaataaattt

SEQ ID NO: 79630 - DNA, 20 bp, Artificial Sequence
  Description of Artificial Sequence: Synthetic oligonucleotide
  Target: SCNA; (+) strand; PAM type: YTN; PAM sequence: TTT
aaaaataaattttcatgaag

SEQ ID NO: 79631 - DNA, 20 bp, Artificial Sequence
  Description of Artificial Sequence: Synthetic oligonucleotide
  Target: SCNA; (+) strand; PAM type: YTN; PAM sequence: TTA
aaaataaattttcatgaagc

SEQ ID NO: 79632 - DNA, 20 bp, Artificial Sequence
  Description of Artificial Sequence: Synthetic oligonucleotide
  Target: SCNA; (+) strand; PAM type: YTN; PAM sequence: TTT
tcatgaagcccaacatgaca

SEQ ID NO: 79633 - DNA, 20 bp, Artificial Sequence
  Description of Artificial Sequence: Synthetic oligonucleotide
  Target: SCNA; (+) strand; PAM type: YTN; PAM sequence: TTT
catgaagcccaacatgacag

SEQ ID NO: 79634 - DNA, 20 bp, Artificial Sequence
  Description of Artificial Sequence: Synthetic oligonucleotide
  Target: SCNA; (+) strand; PAM type: YTN; PAM sequence: TTC
atgaagcccaacatgacagc

SEQ ID NO: 79635 - DNA, 20 bp, Artificial Sequence
  Description of Artificial Sequence: Synthetic oligonucleotide
  Target: SCNA; (+) strand; PAM type: YTN; PAM sequence: CTT
agatattatattcacaatgt

SEQ ID NO: 79636 - DNA, 20 bp, Artificial Sequence
  Description of Artificial Sequence: Synthetic oligonucleotide
  Target: SCNA; (+) strand; PAM type: YTN; PAM sequence: TTA
gatattatattcacaatgtc

SEQ ID NO: 79637 - DNA, 20 bp, Artificial Sequence
  Description of Artificial Sequence: Synthetic oligonucleotide
  Target: SCNA; (+) strand; PAM type: YTN; PAM sequence: TTA
tattcacaatgtcaaacctg

SEQ ID NO: 79638 - DNA, 20 bp, Artificial Sequence
  Description of Artificial Sequence: Synthetic oligonucleotide
  Target: SCNA; (+) strand; PAM type: YTN; PAM sequence: TTC
acaatgtcaaacctgacatt

SEQ ID NO: 79639 - DNA, 20 bp, Artificial Sequence
  Description of Artificial Sequence: Synthetic oligonucleotide
  Target: SCNA; (+) strand; PAM type: YTN; PAM sequence: CTG
acattttaaaacctgctttt

SEQ ID NO: 79640 - DNA, 20 bp, Artificial Sequence
  Description of Artificial Sequence: Synthetic oligonucleotide
  Target: SCNA; (+) strand; PAM type: YTN; PAM sequence: TTT
taaaacctgcttttttttta

SEQ ID NO: 79641 - DNA, 20 bp, Artificial Sequence
  Description of Artificial Sequence: Synthetic oligonucleotide
  Target: SCNA; (+) strand; PAM type: YTN; PAM sequence: TTT
aaaacctgctttttttttat

SEQ ID NO: 79642 - DNA, 20 bp, Artificial Sequence
  Description of Artificial Sequence: Synthetic oligonucleotide
  Target: SCNA; (+) strand; PAM type: YTN; PAM sequence: TTA
aaacctgctttttttttatt

SEQ ID NO: 79643 - DNA, 20 bp, Artificial Sequence
  Description of Artificial Sequence: Synthetic oligonucleotide
  Target: SCNA; (+) strand; PAM type: YTN; PAM sequence: CTG
ctttttttttattcatctag

SEQ ID NO: 79644 - DNA, 20 bp, Artificial Sequence
  Description of Artificial Sequence: Synthetic oligonucleotide
  Target: SCNA; (+) strand; PAM type: YTN; PAM sequence: CTT
tttttttattcatctagcac

SEQ ID NO: 79645 - DNA, 20 bp, Artificial Sequence
  Description of Artificial Sequence: Synthetic oligonucleotide
  Target: SCNA; (+) strand; PAM type: YTN; PAM sequence: TTT
ttttttattcatctagcaca

SEQ ID NO: 79646 - DNA, 20 bp, Artificial Sequence
  Description of Artificial Sequence: Synthetic oligonucleotide
  Target: SCNA; (+) strand; PAM type: YTN; PAM sequence: TTT
tttttattcatctagcacac

SEQ ID NO: 79647 - DNA, 20 bp, Artificial Sequence
  Description of Artificial Sequence: Synthetic oligonucleotide
  Target: SCNA; (+) strand; PAM type: YTN; PAM sequence: TTT
ttttattcatctagcacaca

SEQ ID NO: 79648 - DNA, 20 bp, Artificial Sequence
  Description of Artificial Sequence: Synthetic oligonucleotide
  Target: SCNA; (+) strand; PAM type: YTN; PAM sequence: TTT
tttattcatctagcacacaa

SEQ ID NO: 79649 - DNA, 20 bp, Artificial Sequence
  Description of Artificial Sequence: Synthetic oligonucleotide
  Target: SCNA; (+) strand; PAM type: YTN; PAM sequence: TTT
ttattcatctagcacacaac

SEQ ID NO: 79650 - DNA, 20 bp, Artificial Sequence
  Description of Artificial Sequence: Synthetic oligonucleotide
  Target: SCNA; (+) strand; PAM type: YTN; PAM sequence: TTT
tattcatctagcacacaact

SEQ ID NO: 79651 - DNA, 20 bp, Artificial Sequence
  Description of Artificial Sequence: Synthetic oligonucleotide
  Target: SCNA; (+) strand; PAM type: YTN; PAM sequence: TTT
attcatctagcacacaactg

SEQ ID NO: 79652 - DNA, 20 bp, Artificial Sequence
  Description of Artificial Sequence: Synthetic oligonucleotide
  Target: SCNA; (+) strand; PAM type: YTN; PAM sequence: TTA
ttcatctagcacacaactgg

SEQ ID NO: 79653 - DNA, 20 bp, Artificial Sequence
  Description of Artificial Sequence: Synthetic oligonucleotide
  Target: SCNA; (+) strand; PAM type: YTN; PAM sequence: TTC
atctagcacacaactggcta

SEQ ID NO: 79654 - DNA, 20 bp, Artificial Sequence
  Description of Artificial Sequence: Synthetic oligonucleotide
  Target: SCNA; (+) strand; PAM type: YTN; PAM sequence: CTA
gcacacaactggctagctat

SEQ ID NO: 79655 - DNA, 20 bp, Artificial Sequence
  Description of Artificial Sequence: Synthetic oligonucleotide
  Target: SCNA; (+) strand; PAM type: YTN; PAM sequence: CTG
gctagctatccttttatgaa

SEQ ID NO: 79656 - DNA, 20 bp, Artificial Sequence
  Description of Artificial Sequence: Synthetic oligonucleotide
  Target: SCNA; (+) strand; PAM type: YTN; PAM sequence: CTA
gctatccttttatgaattaa

SEQ ID NO: 79657 - DNA, 20 bp, Artificial Sequence
  Description of Artificial Sequence: Synthetic oligonucleotide
  Target: SCNA; (+) strand; PAM type: YTN; PAM sequence: CTA
tccttttatgaattaagtca

SEQ ID NO: 79658 - DNA, 20 bp, Artificial Sequence
  Description of Artificial Sequence: Synthetic oligonucleotide
  Target: SCNA; (+) strand; PAM type: YTN; PAM sequence: CTT
ttatgaattaagtcaggatt

SEQ ID NO: 79659 - DNA, 20 bp, Artificial Sequence
  Description of Artificial Sequence: Synthetic oligonucleotide
  Target: SCNA; (+) strand; PAM type: YTN; PAM sequence: TTT
tatgaattaagtcaggatta

SEQ ID NO: 79660 - DNA, 20 bp, Artificial Sequence
  Description of Artificial Sequence: Synthetic oligonucleotide
  Target: SCNA; (+) strand; PAM type: YTN; PAM sequence: TTT
atgaattaagtcaggattat

SEQ ID NO: 79661 - DNA, 20 bp, Artificial Sequence
  Description of Artificial Sequence: Synthetic oligonucleotide
  Target: SCNA; (+) strand; PAM type: YTN; PAM sequence: TTA
tgaattaagtcaggattatt

SEQ ID NO: 79662 - DNA, 20 bp, Artificial Sequence
  Description of Artificial Sequence: Synthetic oligonucleotide
  Target: SCNA; (+) strand; PAM type: YTN; PAM sequence: TTA
agtcaggattattacagaat

SEQ ID NO: 79663 - DNA, 20 bp, Artificial Sequence
  Description of Artificial Sequence: Synthetic oligonucleotide
  Target: SCNA; (+) strand; PAM type: YTN; PAM sequence: TTA
ttacagaatatacacgtgtc

SEQ ID NO: 79664 - DNA, 20 bp, Artificial Sequence
  Description of Artificial Sequence: Synthetic oligonucleotide
  Target: SCNA; (+) strand; PAM type: YTN; PAM sequence: TTA
cagaatatacacgtgtcaat

SEQ ID NO: 79665 - DNA, 20 bp, Artificial Sequence
  Description of Artificial Sequence: Synthetic oligonucleotide
  Target: SCNA; (+) strand; PAM type: YTN; PAM sequence: TTT
gaaatcaagatttaaaaaaa

SEQ ID NO: 79666 - DNA, 20 bp, Artificial Sequence
  Description of Artificial Sequence: Synthetic oligonucleotide
  Target: SCNA; (+) strand; PAM type: YTN; PAM sequence: TTG
aaatcaagatttaaaaaaag

SEQ ID NO: 79667 - DNA, 20 bp, Artificial Sequence
  Description of Artificial Sequence: Synthetic oligonucleotide
  Target: SCNA; (+) strand; PAM type: YTN; PAM sequence: TTT
aaaaaaagttgttcataata

SEQ ID NO: 79668 - DNA, 20 bp, Artificial Sequence
  Description of Artificial Sequence: Synthetic oligonucleotide
  Target: SCNA; (+) strand; PAM type: YTN; PAM sequence: TTA
aaaaaagttgttcataatat

SEQ ID NO: 79669 - DNA, 20 bp, Artificial Sequence
  Description of Artificial Sequence: Synthetic oligonucleotide
  Target: SCNA; (+) strand; PAM type: YTN; PAM sequence: TTG
ttcataatatattgatgtaa

SEQ ID NO: 79670 - DNA, 20 bp, Artificial Sequence
  Description of Artificial Sequence: Synthetic oligonucleotide
  Target: SCNA; (+) strand; PAM type: YTN; PAM sequence: TTC
ataatatattgatgtaattt

SEQ ID NO: 79671 - DNA, 20 bp, Artificial Sequence
  Description of Artificial Sequence: Synthetic oligonucleotide
  Target: SCNA; (+) strand; PAM type: YTN; PAM sequence: TTG
atgtaatttttccaaaatgg

SEQ ID NO: 79672 - DNA, 20 bp, Artificial Sequence
  Description of Artificial Sequence: Synthetic oligonucleotide
  Target: SCNA; (+) strand; PAM type: YTN; PAM sequence: TTT
ttccaaaatggcattgctta

SEQ ID NO: 79673 - DNA, 20 bp, Artificial Sequence
  Description of Artificial Sequence: Synthetic oligonucleotide
  Target: SCNA; (+) strand; PAM type: YTN; PAM sequence: TTT
tccaaaatggcattgcttag

SEQ ID NO: 79674 - DNA, 20 bp, Artificial Sequence
  Description of Artificial Sequence: Synthetic oligonucleotide
  Target: SCNA; (+) strand; PAM type: YTN; PAM sequence: TTT
ccaaaatggcattgcttagg

SEQ ID NO: 79675 - DNA, 20 bp, Artificial Sequence
  Description of Artificial Sequence: Synthetic oligonucleotide
  Target: SCNA; (+) strand; PAM type: YTN; PAM sequence: TTC
caaaatggcattgcttagga

SEQ ID NO: 79676 - DNA, 20 bp, Artificial Sequence
  Description of Artificial Sequence: Synthetic oligonucleotide
  Target: SCNA; (+) strand; PAM type: YTN; PAM sequence: TTG
cttaggaacttcattctgat

SEQ ID NO: 79677 - DNA, 20 bp, Artificial Sequence
  Description of Artificial Sequence: Synthetic oligonucleotide
  Target: SCNA; (+) strand; PAM type: YTN; PAM sequence: CTT
aggaacttcattctgatttt

SEQ ID NO: 79678 - DNA, 20 bp, Artificial Sequence
  Description of Artificial Sequence: Synthetic oligonucleotide
  Target: SCNA; (+) strand; PAM type: YTN; PAM sequence: TTA
ggaacttcattctgattttg

SEQ ID NO: 79679 - DNA, 20 bp, Artificial Sequence
  Description of Artificial Sequence: Synthetic oligonucleotide
  Target: SCNA; (+) strand; PAM type: YTN; PAM sequence: CTT
cattctgattttgaacaaca

SEQ ID NO: 79680 - DNA, 20 bp, Artificial Sequence
  Description of Artificial Sequence: Synthetic oligonucleotide
  Target: SCNA; (+) strand; PAM type: YTN; PAM sequence: TTC
attctgattttgaacaacaa

SEQ ID NO: 79681 - DNA, 20 bp, Artificial Sequence
  Description of Artificial Sequence: Synthetic oligonucleotide
  Target: SCNA; (+) strand; PAM type: YTN; PAM sequence: TTC
tgattttgaacaacaataaa

SEQ ID NO: 79682 - DNA, 20 bp, Artificial Sequence
  Description of Artificial Sequence: Synthetic oligonucleotide
  Target: SCNA; (+) strand; PAM type: YTN; PAM sequence: CTG
attttgaacaacaataaata

SEQ ID NO: 79683 - DNA, 20 bp, Artificial Sequence
  Description of Artificial Sequence: Synthetic oligonucleotide
  Target: SCNA; (+) strand; PAM type: YTN; PAM sequence: TTT
tgaacaacaataaataacat

SEQ ID NO: 79684 - DNA, 20 bp, Artificial Sequence
  Description of Artificial Sequence: Synthetic oligonucleotide
  Target: SCNA; (+) strand; PAM type: YTN; PAM sequence: TTT
gaacaacaataaataacatc

SEQ ID NO: 79685 - DNA, 20 bp, Artificial Sequence
  Description of Artificial Sequence: Synthetic oligonucleotide
  Target: SCNA; (+) strand; PAM type: YTN; PAM sequence: TTG
aacaacaataaataacatcg

SEQ ID NO: 79686 - DNA, 20 bp, Artificial Sequence
  Description of Artificial Sequence: Synthetic oligonucleotide
  Target: SCNA; (+) strand; PAM type: YTN; PAM sequence: CTG
aacctggatgttttaagtat

SEQ ID NO: 79687 - DNA, 20 bp, Artificial Sequence
  Description of Artificial Sequence: Synthetic oligonucleotide
  Target: SCNA; (+) strand; PAM type: YTN; PAM sequence: CTG
gatgttttaagtatccaagg

SEQ ID NO: 79688 - DNA, 20 bp, Artificial Sequence
  Description of Artificial Sequence: Synthetic oligonucleotide
  Target: SCNA; (+) strand; PAM type: YTN; PAM sequence: TTT
taagtatccaaggcaacaga

SEQ ID NO: 79689 - DNA, 20 bp, Artificial Sequence
  Description of Artificial Sequence: Synthetic oligonucleotide
  Target: SCNA; (+) strand; PAM type: YTN; PAM sequence: TTT
aagtatccaaggcaacagac

SEQ ID NO: 79690 - DNA, 20 bp, Artificial Sequence
  Description of Artificial Sequence: Synthetic oligonucleotide
  Target: SCNA; (+) strand; PAM type: YTN; PAM sequence: TTA
agtatccaaggcaacagaca

SEQ ID NO: 79691 - DNA, 20 bp, Artificial Sequence
  Description of Artificial Sequence: Synthetic oligonucleotide
  Target: SCNA; (+) strand; PAM type: YTN; PAM sequence: TTT
caagcttatttcttgcgtga

SEQ ID NO: 79692 - DNA, 20 bp, Artificial Sequence
  Description of Artificial Sequence: Synthetic oligonucleotide
  Target: SCNA; (+) strand; PAM type: YTN; PAM sequence: TTC
aagcttatttcttgcgtgaa

SEQ ID NO: 79693 - DNA, 20 bp, Artificial Sequence
  Description of Artificial Sequence: Synthetic oligonucleotide
  Target: SCNA; (+) strand; PAM type: YTN; PAM sequence: CTT
atttcttgcgtgaaaactat

SEQ ID NO: 79694 - DNA, 20 bp, Artificial Sequence
  Description of Artificial Sequence: Synthetic oligonucleotide
  Target: SCNA; (+) strand; PAM type: YTN; PAM sequence: TTA
tttcttgcgtgaaaactatt

SEQ ID NO: 79695 - DNA, 20 bp, Artificial Sequence
  Description of Artificial Sequence: Synthetic oligonucleotide
  Target: SCNA; (+) strand; PAM type: YTN; PAM sequence: TTT
cttgcgtgaaaactattaat

SEQ ID NO: 79696 - DNA, 20 bp, Artificial Sequence
  Description of Artificial Sequence: Synthetic oligonucleotide
  Target: SCNA; (+) strand; PAM type: YTN; PAM sequence: TTC
ttgcgtgaaaactattaatc

SEQ ID NO: 79697 - DNA, 20 bp, Artificial Sequence
  Description of Artificial Sequence: Synthetic oligonucleotide
  Target: SCNA; (+) strand; PAM type: YTN; PAM sequence: CTT
gcgtgaaaactattaatcat

SEQ ID NO: 79698 - DNA, 20 bp, Artificial Sequence
  Description of Artificial Sequence: Synthetic oligonucleotide
  Target: SCNA; (+) strand; PAM type: YTN; PAM sequence: TTG
cgtgaaaactattaatcatc

SEQ ID NO: 79699 - DNA, 20 bp, Artificial Sequence
  Description of Artificial Sequence: Synthetic oligonucleotide
  Target: SCNA; (+) strand; PAM type: YTN; PAM sequence: CTA
ttaatcatcatgtagataag

SEQ ID NO: 79700 - DNA, 20 bp, Artificial Sequence
  Description of Artificial Sequence: Synthetic oligonucleotide
  Target: SCNA; (+) strand; PAM type: YTN; PAM sequence: TTA
atcatcatgtagataagtcg

SEQ ID NO: 79701 - DNA, 20 bp, Artificial Sequence
  Description of Artificial Sequence: Synthetic oligonucleotide
  Target: SCNA; (+) strand; PAM type: YTN; PAM sequence: CTC
aatgggatatgataacgaag

SEQ ID NO: 79702 - DNA, 20 bp, Artificial Sequence
  Description of Artificial Sequence: Synthetic oligonucleotide
  Target: SCNA; (+) strand; PAM type: YTN; PAM sequence: CTG
actgctgtattatttgtcag

SEQ ID NO: 79703 - DNA, 20 bp, Artificial Sequence
  Description of Artificial Sequence: Synthetic oligonucleotide
  Target: SCNA; (+) strand; PAM type: YTN; PAM sequence: CTG
ctgtattatttgtcaggcag

SEQ ID NO: 79704 - DNA, 20 bp, Artificial Sequence
  Description of Artificial Sequence: Synthetic oligonucleotide
  Target: SCNA; (+) strand; PAM type: YTN; PAM sequence: CTG
tattatttgtcaggcagtgg

SEQ ID NO: 79705 - DNA, 20 bp, Artificial Sequence
  Description of Artificial Sequence: Synthetic oligonucleotide
  Target: SCNA; (+) strand; PAM type: YTN; PAM sequence: TTA
tttgtcaggcagtggcttca

SEQ ID NO: 79706 - DNA, 20 bp, Artificial Sequence
  Description of Artificial Sequence: Synthetic oligonucleotide
  Target: SCNA; (+) strand; PAM type: YTN; PAM sequence: TTT
gtcaggcagtggcttcacag

SEQ ID NO: 79707 - DNA, 20 bp, Artificial Sequence
  Description of Artificial Sequence: Synthetic oligonucleotide
  Target: SCNA; (+) strand; PAM type: YTN; PAM sequence: TTG
tcaggcagtggcttcacagt

SEQ ID NO: 79708 - DNA, 20 bp, Artificial Sequence
  Description of Artificial Sequence: Synthetic oligonucleotide
  Target: SCNA; (+) strand; PAM type: YTN; PAM sequence: CTT
cacagtttattcaggacttt

SEQ ID NO: 79709 - DNA, 20 bp, Artificial Sequence
  Description of Artificial Sequence: Synthetic oligonucleotide
  Target: SCNA; (+) strand; PAM type: YTN; PAM sequence: TTC
acagtttattcaggactttt

SEQ ID NO: 79710 - DNA, 20 bp, Artificial Sequence
  Description of Artificial Sequence: Synthetic oligonucleotide
  Target: SCNA; (+) strand; PAM type: YTN; PAM sequence: TTT
attcaggacttttgctctct

SEQ ID NO: 79711 - DNA, 20 bp, Artificial Sequence
  Description of Artificial Sequence: Synthetic oligonucleotide
  Target: SCNA; (+) strand; PAM type: YTN; PAM sequence: TTA
ttcaggacttttgctctcta

SEQ ID NO: 79712 - DNA, 20 bp, Artificial Sequence
  Description of Artificial Sequence: Synthetic oligonucleotide
  Target: SCNA; (+) strand; PAM type: YTN; PAM sequence: TTC
aggacttttgctctctaaaa

SEQ ID NO: 79713 - DNA, 20 bp, Artificial Sequence
  Description of Artificial Sequence: Synthetic oligonucleotide
  Target: SCNA; (+) strand; PAM type: YTN; PAM sequence: CTT
ttgctctctaaaactccaga

SEQ ID NO: 79714 - DNA, 20 bp, Artificial Sequence
  Description of Artificial Sequence: Synthetic oligonucleotide
  Target: SCNA; (+) strand; PAM type: YTN; PAM sequence: TTT
tgctctctaaaactccagaa

SEQ ID NO: 79715 - DNA, 20 bp, Artificial Sequence
  Description of Artificial Sequence: Synthetic oligonucleotide
  Target: SCNA; (+) strand; PAM type: YTN; PAM sequence: TTT
gctctctaaaactccagaaa

SEQ ID NO: 79716 - DNA, 20 bp, Artificial Sequence
  Description of Artificial Sequence: Synthetic oligonucleotide
  Target: SCNA; (+) strand; PAM type: YTN; PAM sequence: TTG
ctctctaaaactccagaaaa

SEQ ID NO: 79717 - DNA, 20 bp, Artificial Sequence
  Description of Artificial Sequence: Synthetic oligonucleotide
  Target: SCNA; (+) strand; PAM type: YTN; PAM sequence: CTC
tctaaaactccagaaaatta

SEQ ID NO: 79718 - DNA, 20 bp, Artificial Sequence
  Description of Artificial Sequence: Synthetic oligonucleotide
  Target: SCNA; (+) strand; PAM type: YTN; PAM sequence: CTC
taaaactccagaaaattaca

SEQ ID NO: 79719 - DNA, 20 bp, Artificial Sequence
  Description of Artificial Sequence: Synthetic oligonucleotide
  Target: SCNA; (+) strand; PAM type: YTN; PAM sequence: CTA
aaactccagaaaattacaaa

SEQ ID NO: 79720 - DNA, 20 bp, Artificial Sequence
  Description of Artificial Sequence: Synthetic oligonucleotide
  Target: SCNA; (+) strand; PAM type: YTN; PAM sequence: CTC
cagaaaattacaaaaatata

SEQ ID NO: 79721 - DNA, 20 bp, Artificial Sequence
  Description of Artificial Sequence: Synthetic oligonucleotide
  Target: SCNA; (+) strand; PAM type: YTN; PAM sequence: TTA
caaaaatataaaaacttcag

SEQ ID NO: 79722 - DNA, 20 bp, Artificial Sequence
  Description of Artificial Sequence: Synthetic oligonucleotide
  Target: SCNA; (+) strand; PAM type: YTN; PAM sequence: CTT
caggatccaactcttttaga

SEQ ID NO: 79723 - DNA, 20 bp, Artificial Sequence
  Description of Artificial Sequence: Synthetic oligonucleotide
  Target: SCNA; (+) strand; PAM type: YTN; PAM sequence: TTC
aggatccaactcttttagag

SEQ ID NO: 79724 - DNA, 20 bp, Artificial Sequence
  Description of Artificial Sequence: Synthetic oligonucleotide
  Target: SCNA; (+) strand; PAM type: YTN; PAM sequence: CTC
ttttagagcattccatgtgg

SEQ ID NO: 79725 - DNA, 20 bp, Artificial Sequence
  Description of Artificial Sequence: Synthetic oligonucleotide
  Target: SCNA; (+) strand; PAM type: YTN; PAM sequence: CTT
ttagagcattccatgtggca

SEQ ID NO: 79726 - DNA, 20 bp, Artificial Sequence
  Description of Artificial Sequence: Synthetic oligonucleotide
  Target: SCNA; (+) strand; PAM type: YTN; PAM sequence: TTT
tagagcattccatgtggcat

SEQ ID NO: 79727 - DNA, 20 bp, Artificial Sequence
  Description of Artificial Sequence: Synthetic oligonucleotide
  Target: SCNA; (+) strand; PAM type: YTN; PAM sequence: TTT
agagcattccatgtggcatg

SEQ ID NO: 79728 - DNA, 20 bp, Artificial Sequence
  Description of Artificial Sequence: Synthetic oligonucleotide
  Target: SCNA; (+) strand; PAM type: YTN; PAM sequence: TTA
gagcattccatgtggcatga

SEQ ID NO: 79729 - DNA, 20 bp, Artificial Sequence
  Description of Artificial Sequence: Synthetic oligonucleotide
  Target: SCNA; (+) strand; PAM type: YTN; PAM sequence: TTC
catgtggcatgaaagagatg

SEQ ID NO: 79730 - DNA, 20 bp, Artificial Sequence
  Description of Artificial Sequence: Synthetic oligonucleotide
  Target: SCNA; (+) strand; PAM type: YTN; PAM sequence: CTC
attagttcagcaaggattta

SEQ ID NO: 79731 - DNA, 20 bp, Artificial Sequence
  Description of Artificial Sequence: Synthetic oligonucleotide
  Target: SCNA; (+) strand; PAM type: YTN; PAM sequence: TTA
gttcagcaaggatttatttg

SEQ ID NO: 79732 - DNA, 20 bp, Artificial Sequence
  Description of Artificial Sequence: Synthetic oligonucleotide
  Target: SCNA; (+) strand; PAM type: YTN; PAM sequence: TTC
agcaaggatttatttgagca

SEQ ID NO: 79733 - DNA, 20 bp, Artificial Sequence
  Description of Artificial Sequence: Synthetic oligonucleotide
  Target: SCNA; (+) strand; PAM type: YTN; PAM sequence: TTT
atttgagcaccagccacaag

SEQ ID NO: 79734 - DNA, 20 bp, Artificial Sequence
  Description of Artificial Sequence: Synthetic oligonucleotide
  Target: SCNA; (+) strand; PAM type: YTN; PAM sequence: TTA
tttgagcaccagccacaagc

SEQ ID NO: 79735 - DNA, 20 bp, Artificial Sequence
  Description of Artificial Sequence: Synthetic oligonucleotide
  Target: SCNA; (+) strand; PAM type: YTN; PAM sequence: TTT
gagcaccagccacaagcaag

SEQ ID NO: 79736 - DNA, 20 bp, Artificial Sequence
  Description of Artificial Sequence: Synthetic oligonucleotide
  Target: SCNA; (+) strand; PAM type: YTN; PAM sequence: TTG
agcaccagccacaagcaaga

SEQ ID NO: 79737 - DNA, 20 bp, Artificial Sequence
  Description of Artificial Sequence: Synthetic oligonucleotide
  Target: SCNA; (+) strand; PAM type: YTN; PAM sequence: CTG
ttgaggagctgggatagacc

SEQ ID NO: 79738 - DNA, 20 bp, Artificial Sequence
  Description of Artificial Sequence: Synthetic oligonucleotide
  Target: SCNA; (+) strand; PAM type: YTN; PAM sequence: TTG
aggagctgggatagaccaag

SEQ ID NO: 79739 - DNA, 20 bp, Artificial Sequence
  Description of Artificial Sequence: Synthetic oligonucleotide
  Target: SCNA; (+) strand; PAM type: YTN; PAM sequence: CTG
ggatagaccaagtgttctag

SEQ ID NO: 79740 - DNA, 20 bp, Artificial Sequence
  Description of Artificial Sequence: Synthetic oligonucleotide
  Target: SCNA; (+) strand; PAM type: YTN; PAM sequence: TTC
tagtggctactccacactgc

SEQ ID NO: 79741 - DNA, 20 bp, Artificial Sequence
  Description of Artificial Sequence: Synthetic oligonucleotide
  Target: SCNA; (+) strand; PAM type: YTN; PAM sequence: CTA
gtggctactccacactgcac

SEQ ID NO: 79742 - DNA, 20 bp, Artificial Sequence
  Description of Artificial Sequence: Synthetic oligonucleotide
  Target: SCNA; (+) strand; PAM type: YTN; PAM sequence: CTA
ctccacactgcacgcatagt

SEQ ID NO: 79743 - DNA, 20 bp, Artificial Sequence
  Description of Artificial Sequence: Synthetic oligonucleotide
  Target: SCNA; (+) strand; PAM type: YTN; PAM sequence: CTC
cacactgcacgcatagtagc

SEQ ID NO: 79744 - DNA, 20 bp, Artificial Sequence
  Description of Artificial Sequence: Synthetic oligonucleotide
  Target: SCNA; (+) strand; PAM type: YTN; PAM sequence: CTG
cacgcatagtagcattacag

SEQ ID NO: 79745 - DNA, 20 bp, Artificial Sequence
  Description of Artificial Sequence: Synthetic oligonucleotide
  Target: SCNA; (+) strand; PAM type: YTN; PAM sequence: TTA
cagaataacgctgattcaag

SEQ ID NO: 79746 - DNA, 20 bp, Artificial Sequence
  Description of Artificial Sequence: Synthetic oligonucleotide
  Target: SCNA; (+) strand; PAM type: YTN; PAM sequence: CTG
attcaagtcactttctttgt

SEQ ID NO: 79747 - DNA, 20 bp, Artificial Sequence
  Description of Artificial Sequence: Synthetic oligonucleotide
  Target: SCNA; (+) strand; PAM type: YTN; PAM sequence: TTC
aagtcactttctttgtacaa

SEQ ID NO: 79748 - DNA, 20 bp, Artificial Sequence
  Description of Artificial Sequence: Synthetic oligonucleotide
  Target: SCNA; (+) strand; PAM type: YTN; PAM sequence: CTT
tctttgtacaatattcttag

SEQ ID NO: 79749 - DNA, 20 bp, Artificial Sequence
  Description of Artificial Sequence: Synthetic oligonucleotide
  Target: SCNA; (+) strand; PAM type: YTN; PAM sequence: TTT
ctttgtacaatattcttaga

SEQ ID NO: 79750 - DNA, 20 bp, Artificial Sequence
  Description of Artificial Sequence: Synthetic oligonucleotide
  Target: SCNA; (+) strand; PAM type: YTN; PAM sequence: TTC
tttgtacaatattcttagaa

SEQ ID NO: 79751 - DNA, 20 bp, Artificial Sequence
  Description of Artificial Sequence: Synthetic oligonucleotide
  Target: SCNA; (+) strand; PAM type: YTN; PAM sequence: CTT
tgtacaatattcttagaaca

SEQ ID NO: 79752 - DNA, 20 bp, Artificial Sequence
  Description of Artificial Sequence: Synthetic oligonucleotide
  Target: SCNA; (+) strand; PAM type: YTN; PAM sequence: TTT
gtacaatattcttagaacaa

SEQ ID NO: 79753 - DNA, 20 bp, Artificial Sequence
  Description of Artificial Sequence: Synthetic oligonucleotide
  Target: SCNA; (+) strand; PAM type: YTN; PAM sequence: TTG
tacaatattcttagaacaag

SEQ ID NO: 79754 - DNA, 20 bp, Artificial Sequence
  Description of Artificial Sequence: Synthetic oligonucleotide
  Target: SCNA; (+) strand; PAM type: YTN; PAM sequence: TTC
ttagaacaagcagatctttc

SEQ ID NO: 79755 - DNA, 20 bp, Artificial Sequence
  Description of Artificial Sequence: Synthetic oligonucleotide
  Target: SCNA; (+) strand; PAM type: YTN; PAM sequence: CTT
agaacaagcagatctttctt

SEQ ID NO: 79756 - DNA, 20 bp, Artificial Sequence
  Description of Artificial Sequence: Synthetic oligonucleotide
  Target: SCNA; (+) strand; PAM type: YTN; PAM sequence: TTA
gaacaagcagatctttcttc

SEQ ID NO: 79757 - DNA, 20 bp, Artificial Sequence
  Description of Artificial Sequence: Synthetic oligonucleotide
  Target: SCNA; (+) strand; PAM type: YTN; PAM sequence: CTT
tcttcttcaatagaagtagg

SEQ ID NO: 79758 - DNA, 20 bp, Artificial Sequence
  Description of Artificial Sequence: Synthetic oligonucleotide
  Target: SCNA; (+) strand; PAM type: YTN; PAM sequence: TTT
cttcttcaatagaagtagga

SEQ ID NO: 79759 - DNA, 20 bp, Artificial Sequence
  Description of Artificial Sequence: Synthetic oligonucleotide
  Target: SCNA; (+) strand; PAM type: YTN; PAM sequence: TTC
ttcttcaatagaagtaggaa

SEQ ID NO: 79760 - DNA, 20 bp, Artificial Sequence
  Description of Artificial Sequence: Synthetic oligonucleotide
  Target: SCNA; (+) strand; PAM type: YTN; PAM sequence: CTT
cttcaatagaagtaggaaat

SEQ ID NO: 79761 - DNA, 20 bp, Artificial Sequence
  Description of Artificial Sequence: Synthetic oligonucleotide
  Target: SCNA; (+) strand; PAM type: YTN; PAM sequence: TTC
ttcaatagaagtaggaaata

SEQ ID NO: 79762 - DNA, 20 bp, Artificial Sequence
  Description of Artificial Sequence: Synthetic oligonucleotide
  Target: SCNA; (+) strand; PAM type: YTN; PAM sequence: CTT
caatagaagtaggaaatata

SEQ ID NO: 79763 - DNA, 20 bp, Artificial Sequence
  Description of Artificial Sequence: Synthetic oligonucleotide
  Target: SCNA; (+) strand; PAM type: YTN; PAM sequence: TTC
aatagaagtaggaaatataa

SEQ ID NO: 79764 - DNA, 20 bp, Artificial Sequence
  Description of Artificial Sequence: Synthetic oligonucleotide
  Target: SCNA; (+) strand; PAM type: YTN; PAM sequence: TTT
tctctatataacatcactgt

SEQ ID NO: 79765 - DNA, 20 bp, Artificial Sequence
  Description of Artificial Sequence: Synthetic oligonucleotide
  Target: SCNA; (+) strand; PAM type: YTN; PAM sequence: TTT
ctctatataacatcactgtt

SEQ ID NO: 79766 - DNA, 20 bp, Artificial Sequence
  Description of Artificial Sequence: Synthetic oligonucleotide
  Target: SCNA; (+) strand; PAM type: YTN; PAM sequence: TTC
tctatataacatcactgttg

SEQ ID NO: 79767 - DNA, 20 bp, Artificial Sequence
  Description of Artificial Sequence: Synthetic oligonucleotide
  Target: SCNA; (+) strand; PAM type: YTN; PAM sequence: CTC
tatataacatcactgttgct

SEQ ID NO: 79768 - DNA, 20 bp, Artificial Sequence
  Description of Artificial Sequence: Synthetic oligonucleotide
  Target: SCNA; (+) strand; PAM type: YTN; PAM sequence: CTA
tataacatcactgttgcttt

SEQ ID NO: 79769 - DNA, 20 bp, Artificial Sequence
  Description of Artificial Sequence: Synthetic oligonucleotide
  Target: SCNA; (+) strand; PAM type: YTN; PAM sequence: CTG
ttgctttgcacttaaaattt

SEQ ID NO: 79770 - DNA, 20 bp, Artificial Sequence
  Description of Artificial Sequence: Synthetic oligonucleotide
  Target: SCNA; (+) strand; PAM type: YTN; PAM sequence: TTG
ctttgcacttaaaatttctg

SEQ ID NO: 79771 - DNA, 20 bp, Artificial Sequence
  Description of Artificial Sequence: Synthetic oligonucleotide
  Target: SCNA; (+) strand; PAM type: YTN; PAM sequence: CTT
tgcacttaaaatttctgcct

SEQ ID NO: 79772 - DNA, 20 bp, Artificial Sequence
  Description of Artificial Sequence: Synthetic oligonucleotide
  Target: SCNA; (+) strand; PAM type: YTN; PAM sequence: TTT
gcacttaaaatttctgcctg

SEQ ID NO: 79773 - DNA, 20 bp, Artificial Sequence
  Description of Artificial Sequence: Synthetic oligonucleotide
  Target: SCNA; (+) strand; PAM type: YTN; PAM sequence: TTG
cacttaaaatttctgcctgt

SEQ ID NO: 79774 - DNA, 20 bp, Artificial Sequence
  Description of Artificial Sequence: Synthetic oligonucleotide
  Target: SCNA; (+) strand; PAM type: YTN; PAM sequence: CTT
aaaatttctgcctgtgcact

SEQ ID NO: 79775 - DNA, 20 bp, Artificial Sequence
  Description of Artificial Sequence: Synthetic oligonucleotide
  Target: SCNA; (+) strand; PAM type: YTN; PAM sequence: TTA
aaatttctgcctgtgcactt

SEQ ID NO: 79776 - DNA, 20 bp, Artificial Sequence
  Description of Artificial Sequence: Synthetic oligonucleotide
  Target: SCNA; (+) strand; PAM type: YTN; PAM sequence: TTT
ctgcctgtgcacttttaacc

SEQ ID NO: 79777 - DNA, 20 bp, Artificial Sequence
  Description of Artificial Sequence: Synthetic oligonucleotide
  Target: SCNA; (+) strand; PAM type: YTN; PAM sequence: TTC
tgcctgtgcacttttaacct

SEQ ID NO: 79778 - DNA, 20 bp, Artificial Sequence
  Description of Artificial Sequence: Synthetic oligonucleotide
  Target: SCNA; (+) strand; PAM type: YTN; PAM sequence: CTG
cctgtgcacttttaacctgt

SEQ ID NO: 79779 - DNA, 20 bp, Artificial Sequence
  Description of Artificial Sequence: Synthetic oligonucleotide
  Target: SCNA; (+) strand; PAM type: YTN; PAM sequence: CTG
tgcacttttaacctgtttct

SEQ ID NO: 79780 - DNA, 20 bp, Artificial Sequence
  Description of Artificial Sequence: Synthetic oligonucleotide
  Target: SCNA; (+) strand; PAM type: YTN; PAM sequence: CTT
ttaacctgtttctactctgc

SEQ ID NO: 79781 - DNA, 20 bp, Artificial Sequence
  Description of Artificial Sequence: Synthetic oligonucleotide
  Target: SCNA; (+) strand; PAM type: YTN; PAM sequence: TTT
taacctgtttctactctgcc

SEQ ID NO: 79782 - DNA, 20 bp, Artificial Sequence
  Description of Artificial Sequence: Synthetic oligonucleotide
  Target: SCNA; (+) strand; PAM type: YTN; PAM sequence: TTT
aacctgtttctactctgcca

SEQ ID NO: 79783 - DNA, 20 bp, Artificial Sequence
  Description of Artificial Sequence: Synthetic oligonucleotide
  Target: SCNA; (+) strand; PAM type: YTN; PAM sequence: TTA
acctgtttctactctgccaa

SEQ ID NO: 79784 - DNA, 20 bp, Artificial Sequence
  Description of Artificial Sequence: Synthetic oligonucleotide
  Target: SCNA; (+) strand; PAM type: YTN; PAM sequence: CTG
tttctactctgccaatgaaa

SEQ ID NO: 79785 - DNA, 20 bp, Artificial Sequence
  Description of Artificial Sequence: Synthetic oligonucleotide
  Target: SCNA; (+) strand; PAM type: YTN; PAM sequence: TTT
ctactctgccaatgaaaggt

SEQ ID NO: 79786 - DNA, 20 bp, Artificial Sequence
  Description of Artificial Sequence: Synthetic oligonucleotide
  Target: SCNA; (+) strand; PAM type: YTN; PAM sequence: TTC
tactctgccaatgaaaggta

SEQ ID NO: 79787 - DNA, 20 bp, Artificial Sequence
  Description of Artificial Sequence: Synthetic oligonucleotide
  Target: SCNA; (+) strand; PAM type: YTN; PAM sequence: CTA
ctctgccaatgaaaggtatg

SEQ ID NO: 79788 - DNA, 20 bp, Artificial Sequence
  Description of Artificial Sequence: Synthetic oligonucleotide
  Target: SCNA; (+) strand; PAM type: YTN; PAM sequence: CTC
tgccaatgaaaggtatgaac

SEQ ID NO: 79789 - DNA, 20 bp, Artificial Sequence
  Description of Artificial Sequence: Synthetic oligonucleotide
  Target: SCNA; (+) strand; PAM type: YTN; PAM sequence: CTG
ccaatgaaaggtatgaactt

SEQ ID NO: 79790 - DNA, 20 bp, Artificial Sequence
  Description of Artificial Sequence: Synthetic oligonucleotide
  Target: SCNA; (+) strand; PAM type: YTN; PAM sequence: CTT
caagaaatgaattgtatgac

SEQ ID NO: 79791 - DNA, 20 bp, Artificial Sequence
  Description of Artificial Sequence: Synthetic oligonucleotide
  Target: SCNA; (+) strand; PAM type: YTN; PAM sequence: TTC
aagaaatgaattgtatgact

SEQ ID NO: 79792 - DNA, 20 bp, Artificial Sequence
  Description of Artificial Sequence: Synthetic oligonucleotide
  Target: SCNA; (+) strand; PAM type: YTN; PAM sequence: TTG
tatgactgataacttcttat

SEQ ID NO: 79793 - DNA, 20 bp, Artificial Sequence
  Description of Artificial Sequence: Synthetic oligonucleotide
  Target: SCNA; (+) strand; PAM type: YTN; PAM sequence: CTG
ataacttcttatgtgcacat

SEQ ID NO: 79794 - DNA, 20 bp, Artificial Sequence
  Description of Artificial Sequence: Synthetic oligonucleotide
  Target: SCNA; (+) strand; PAM type: YTN; PAM sequence: CTT
cttatgtgcacatgagtaaa

SEQ ID NO: 79795 - DNA, 20 bp, Artificial Sequence
  Description of Artificial Sequence: Synthetic oligonucleotide
  Target: SCNA; (+) strand; PAM type: YTN; PAM sequence: TTC
ttatgtgcacatgagtaaaa

SEQ ID NO: 79796 - DNA, 20 bp, Artificial Sequence
  Description of Artificial Sequence: Synthetic oligonucleotide
  Target: SCNA; (+) strand; PAM type: YTN; PAM sequence: CTT
atgtgcacatgagtaaaaat

SEQ ID NO: 79797 - DNA, 20 bp, Artificial Sequence
  Description of Artificial Sequence: Synthetic oligonucleotide
  Target: SCNA; (+) strand; PAM type: YTN; PAM sequence: TTA
tgtgcacatgagtaaaaata

SEQ ID NO: 79798 - DNA, 20 bp, Artificial Sequence
  Description of Artificial Sequence: Synthetic oligonucleotide
  Target: SCNA; (+) strand; PAM type: YTN; PAM sequence: CTA
ttattctaatgtactaaaca

SEQ ID NO: 79799 - DNA, 20 bp, Artificial Sequence
  Description of Artificial Sequence: Synthetic oligonucleotide
  Target: SCNA; (+) strand; PAM type: YTN; PAM sequence: TTA
ttctaatgtactaaacacaa

SEQ ID NO: 79800 - DNA, 20 bp, Artificial Sequence
  Description of Artificial Sequence: Synthetic oligonucleotide
  Target: SCNA; (+) strand; PAM type: YTN; PAM sequence: TTC
taatgtactaaacacaagag

SEQ ID NO: 79801 - DNA, 20 bp, Artificial Sequence
  Description of Artificial Sequence: Synthetic oligonucleotide
  Target: SCNA; (+) strand; PAM type: YTN; PAM sequence: CTA
atgtactaaacacaagagtt

SEQ ID NO: 79802 - DNA, 20 bp, Artificial Sequence
  Description of Artificial Sequence: Synthetic oligonucleotide
  Target: SCNA; (+) strand; PAM type: YTN; PAM sequence: CTA
aacacaagagttaatattgt

SEQ ID NO: 79803 - DNA, 20 bp, Artificial Sequence
  Description of Artificial Sequence: Synthetic oligonucleotide
  Target: SCNA; (+) strand; PAM type: YTN; PAM sequence: TTA
atattgttctgtaaaacaaa

SEQ ID NO: 79804 - DNA, 20 bp, Artificial Sequence
  Description of Artificial Sequence: Synthetic oligonucleotide
  Target: SCNA; (+) strand; PAM type: YTN; PAM sequence: TTG
ttctgtaaaacaaaatctta

SEQ ID NO: 79805 - DNA, 20 bp, Artificial Sequence
  Description of Artificial Sequence: Synthetic oligonucleotide
  Target: SCNA; (+) strand; PAM type: YTN; PAM sequence: TTC
tgtaaaacaaaatcttataa

SEQ ID NO: 79806 - DNA, 20 bp, Artificial Sequence
  Description of Artificial Sequence: Synthetic oligonucleotide
  Target: SCNA; (+) strand; PAM type: YTN; PAM sequence: CTG
taaaacaaaatcttataatt

SEQ ID NO: 79807 - DNA, 20 bp, Artificial Sequence
  Description of Artificial Sequence: Synthetic oligonucleotide
  Target: SCNA; (+) strand; PAM type: YTN; PAM sequence: CTT
ataattcaagataactcatt

SEQ ID NO: 79808 - DNA, 20 bp, Artificial Sequence
  Description of Artificial Sequence: Synthetic oligonucleotide
  Target: SCNA; (+) strand; PAM type: YTN; PAM sequence: TTA
taattcaagataactcattt

SEQ ID NO: 79809 - DNA, 20 bp, Artificial Sequence
  Description of Artificial Sequence: Synthetic oligonucleotide
  Target: SCNA; (+) strand; PAM type: YTN; PAM sequence: TTC
aagataactcatttgtcctt

SEQ ID NO: 79810 - DNA, 20 bp, Artificial Sequence
  Description of Artificial Sequence: Synthetic oligonucleotide
  Target: SCNA; (+) strand; PAM type: YTN; PAM sequence: CTC
atttgtcctttaactagtct

SEQ ID NO: 79811 - DNA, 20 bp, Artificial Sequence
  Description of Artificial Sequence: Synthetic oligonucleotide
  Target: SCNA; (+) strand; PAM type: YTN; PAM sequence: TTT
gtcctttaactagtcttata

SEQ ID NO: 79812 - DNA, 20 bp, Artificial Sequence
  Description of Artificial Sequence: Synthetic oligonucleotide
  Target: SCNA; (+) strand; PAM type: YTN; PAM sequence: TTG
tcctttaactagtcttatac

SEQ ID NO: 79813 - DNA, 20 bp, Artificial Sequence
  Description of Artificial Sequence: Synthetic oligonucleotide
  Target: SCNA; (+) strand; PAM type: YTN; PAM sequence: CTT
taactagtcttatacttaga

SEQ ID NO: 79814 - DNA, 20 bp, Artificial Sequence
  Description of Artificial Sequence: Synthetic oligonucleotide
  Target: SCNA; (+) strand; PAM type: YTN; PAM sequence: TTT
aactagtcttatacttagaa

SEQ ID NO: 79815 - DNA, 20 bp, Artificial Sequence
  Description of Artificial Sequence: Synthetic oligonucleotide
  Target: SCNA; (+) strand; PAM type: YTN; PAM sequence: TTA
actagtcttatacttagaaa

SEQ ID NO: 79816 - DNA, 20 bp, Artificial Sequence
  Description of Artificial Sequence: Synthetic oligonucleotide
  Target: SCNA; (+) strand; PAM type: YTN; PAM sequence: CTA
gtcttatacttagaaattat

SEQ ID NO: 79817 - DNA, 20 bp, Artificial Sequence
  Description of Artificial Sequence: Synthetic oligonucleotide
  Target: SCNA; (+) strand; PAM type: YTN; PAM sequence: CTT
atacttagaaattattacta

SEQ ID NO: 79818 - DNA, 20 bp, Artificial Sequence
  Description of Artificial Sequence: Synthetic oligonucleotide
  Target: SCNA; (+) strand; PAM type: YTN; PAM sequence: TTA
tacttagaaattattactaa

SEQ ID NO: 79819 - DNA, 20 bp, Artificial Sequence
  Description of Artificial Sequence: Synthetic oligonucleotide
  Target: SCNA; (+) strand; PAM type: YTN; PAM sequence: CTT
agaaattattactaagggca

SEQ ID NO: 79820 - DNA, 20 bp, Artificial Sequence
  Description of Artificial Sequence: Synthetic oligonucleotide
  Target: SCNA; (+) strand; PAM type: YTN; PAM sequence: TTA
gaaattattactaagggcag

SEQ ID NO: 79821 - DNA, 20 bp, Artificial Sequence
  Description of Artificial Sequence: Synthetic oligonucleotide
  Target: SCNA; (+) strand; PAM type: YTN; PAM sequence: TTA
ttactaagggcagctacatt

SEQ ID NO: 79822 - DNA, 20 bp, Artificial Sequence
  Description of Artificial Sequence: Synthetic oligonucleotide
  Target: SCNA; (+) strand; PAM type: YTN; PAM sequence: TTA
ctaagggcagctacattcat

SEQ ID NO: 79823 - DNA, 20 bp, Artificial Sequence
  Description of Artificial Sequence: Synthetic oligonucleotide
  Target: SCNA; (+) strand; PAM type: YTN; PAM sequence: CTA
agggcagctacattcatatg

SEQ ID NO: 79824 - DNA, 20 bp, Artificial Sequence
  Description of Artificial Sequence: Synthetic oligonucleotide
  Target: SCNA; (+) strand; PAM type: YTN; PAM sequence: CTA
cattcatatgatcaaattaa

SEQ ID NO: 79825 - DNA, 20 bp, Artificial Sequence
  Description of Artificial Sequence: Synthetic oligonucleotide
  Target: SCNA; (+) strand; PAM type: YTN; PAM sequence: TTC
atatgatcaaattaacaaaa

SEQ ID NO: 79826 - DNA, 20 bp, Artificial Sequence
  Description of Artificial Sequence: Synthetic oligonucleotide
  Target: SCNA; (+) strand; PAM type: YTN; PAM sequence: TTA
acaaaacaggtatctgcttt

SEQ ID NO: 79827 - DNA, 20 bp, Artificial Sequence
  Description of Artificial Sequence: Synthetic oligonucleotide
  Target: SCNA; (+) strand; PAM type: YTN; PAM sequence: CTG
ctttgatttactctcgattt

SEQ ID NO: 79828 - DNA, 20 bp, Artificial Sequence
  Description of Artificial Sequence: Synthetic oligonucleotide
  Target: SCNA; (+) strand; PAM type: YTN; PAM sequence: CTT
tgatttactctcgatttatt

SEQ ID NO: 79829 - DNA, 20 bp, Artificial Sequence
  Description of Artificial Sequence: Synthetic oligonucleotide
  Target: SCNA; (+) strand; PAM type: YTN; PAM sequence: TTT
gatttactctcgatttattg

SEQ ID NO: 79830 - DNA, 20 bp, Artificial Sequence
  Description of Artificial Sequence: Synthetic oligonucleotide
  Target: SCNA; (+) strand; PAM type: YTN; PAM sequence: TTG
atttactctcgatttattgg

SEQ ID NO: 79831 - DNA, 20 bp, Artificial Sequence
  Description of Artificial Sequence: Synthetic oligonucleotide
  Target: SCNA; (+) strand; PAM type: YTN; PAM sequence: TTT
actctcgatttattggttgt

SEQ ID NO: 79832 - DNA, 20 bp, Artificial Sequence
  Description of Artificial Sequence: Synthetic oligonucleotide
  Target: SCNA; (+) strand; PAM type: YTN; PAM sequence: TTA
ctctcgatttattggttgtt

SEQ ID NO: 79833 - DNA, 20 bp, Artificial Sequence
  Description of Artificial Sequence: Synthetic oligonucleotide
  Target: SCNA; (+) strand; PAM type: YTN; PAM sequence: CTC
tcgatttattggttgttcag

SEQ ID NO: 79834 - DNA, 20 bp, Artificial Sequence
  Description of Artificial Sequence: Synthetic oligonucleotide
  Target: SCNA; (+) strand; PAM type: YTN; PAM sequence: CTC
gatttattggttgttcagaa

SEQ ID NO: 79835 - DNA, 20 bp, Artificial Sequence
  Description of Artificial Sequence: Synthetic oligonucleotide
  Target: SCNA; (+) strand; PAM type: YTN; PAM sequence: TTT
attggttgttcagaattatg

SEQ ID NO: 79836 - DNA, 20 bp, Artificial Sequence
  Description of Artificial Sequence: Synthetic oligonucleotide
  Target: SCNA; (+) strand; PAM type: YTN; PAM sequence: TTA
ttggttgttcagaattatgt

SEQ ID NO: 79837 - DNA, 20 bp, Artificial Sequence
  Description of Artificial Sequence: Synthetic oligonucleotide
  Target: SCNA; (+) strand; PAM type: YTN; PAM sequence: TTG
gttgttcagaattatgtcat

SEQ ID NO: 79838 - DNA, 20 bp, Artificial Sequence
  Description of Artificial Sequence: Synthetic oligonucleotide
  Target: SCNA; (+) strand; PAM type: YTN; PAM sequence: TTG
ttcagaattatgtcatttaa

SEQ ID NO: 79839 - DNA, 20 bp, Artificial Sequence
  Description of Artificial Sequence: Synthetic oligonucleotide
  Target: SCNA; (+) strand; PAM type: YTN; PAM sequence: TTC
agaattatgtcatttaattt

SEQ ID NO: 79840 - DNA, 20 bp, Artificial Sequence
  Description of Artificial Sequence: Synthetic oligonucleotide
  Target: SCNA; (+) strand; PAM type: YTN; PAM sequence: TTA
tgtcatttaatttccaccta

SEQ ID NO: 79841 - DNA, 20 bp, Artificial Sequence
  Description of Artificial Sequence: Synthetic oligonucleotide
  Target: SCNA; (+) strand; PAM type: YTN; PAM sequence: TTT
aatttccacctatttgtgaa

SEQ ID NO: 79842 - DNA, 20 bp, Artificial Sequence
  Description of Artificial Sequence: Synthetic oligonucleotide
  Target: SCNA; (+) strand; PAM type: YTN; PAM sequence: TTA
atttccacctatttgtgaag

SEQ ID NO: 79843 - DNA, 20 bp, Artificial Sequence
  Description of Artificial Sequence: Synthetic oligonucleotide
  Target: SCNA; (+) strand; PAM type: YTN; PAM sequence: TTT
ccacctatttgtgaagggag

SEQ ID NO: 79844 - DNA, 20 bp, Artificial Sequence
  Description of Artificial Sequence: Synthetic oligonucleotide
  Target: SCNA; (+) strand; PAM type: YTN; PAM sequence: TTC
cacctatttgtgaagggaga

SEQ ID NO: 79845 - DNA, 20 bp, Artificial Sequence
  Description of Artificial Sequence: Synthetic oligonucleotide
  Target: SCNA; (+) strand; PAM type: YTN; PAM sequence: CTA
tttgtgaagggagagggaac

SEQ ID NO: 79846 - DNA, 20 bp, Artificial Sequence
  Description of Artificial Sequence: Synthetic oligonucleotide
  Target: SCNA; (+) strand; PAM type: YTN; PAM sequence: TTT
gtgaagggagagggaacttt

SEQ ID NO: 79847 - DNA, 20 bp, Artificial Sequence
  Description of Artificial Sequence: Synthetic oligonucleotide
  Target: SCNA; (+) strand; PAM type: YTN; PAM sequence: TTG
tgaagggagagggaactttc

SEQ ID NO: 79848 - DNA, 20 bp, Artificial Sequence
  Description of Artificial Sequence: Synthetic oligonucleotide
  Target: SCNA; (+) strand; PAM type: YTN; PAM sequence: CTT
tccctccctcatcaactaga

SEQ ID NO: 79849 - DNA, 20 bp, Artificial Sequence
  Description of Artificial Sequence: Synthetic oligonucleotide
  Target: SCNA; (+) strand; PAM type: YTN; PAM sequence: TTT
ccctccctcatcaactagag

SEQ ID NO: 79850 - DNA, 20 bp, Artificial Sequence
  Description of Artificial Sequence: Synthetic oligonucleotide
  Target: SCNA; (+) strand; PAM type: YTN; PAM sequence: TTC
cctccctcatcaactagagg

SEQ ID NO: 79851 - DNA, 20 bp, Artificial Sequence
  Description of Artificial Sequence: Synthetic oligonucleotide
  Target: SCNA; (+) strand; PAM type: YTN; PAM sequence: CTC
cctcatcaactagagggtga

SEQ ID NO: 79852 - DNA, 20 bp, Artificial Sequence
  Description of Artificial Sequence: Synthetic oligonucleotide
  Target: SCNA; (+) strand; PAM type: YTN; PAM sequence: CTC
atcaactagagggtgatgga

SEQ ID NO: 79853 - DNA, 20 bp, Artificial Sequence
  Description of Artificial Sequence: Synthetic oligonucleotide
  Target: SCNA; (+) strand; PAM type: YTN; PAM sequence: CTA
gagggtgatggaccagatac

SEQ ID NO: 79854 - DNA, 20 bp, Artificial Sequence
  Description of Artificial Sequence: Synthetic oligonucleotide
  Target: SCNA; (+) strand; PAM type: YTN; PAM sequence: CTC
aaagggcatgaaaggtgaaa

SEQ ID NO: 79855 - DNA, 20 bp, Artificial Sequence
  Description of Artificial Sequence: Synthetic oligonucleotide
  Target: SCNA; (+) strand; PAM type: YTN; PAM sequence: TTA
ctccctttcagtgttcctga

SEQ ID NO: 79856 - DNA, 20 bp, Artificial Sequence
  Description of Artificial Sequence: Synthetic oligonucleotide
  Target: SCNA; (+) strand; PAM type: YTN; PAM sequence: CTC
cctttcagtgttcctgatct

SEQ ID NO: 79857 - DNA, 20 bp, Artificial Sequence
  Description of Artificial Sequence: Synthetic oligonucleotide
  Target: SCNA; (+) strand; PAM type: YTN; PAM sequence: CTT
tcagtgttcctgatcttaaa

SEQ ID NO: 79858 - DNA, 20 bp, Artificial Sequence
  Description of Artificial Sequence: Synthetic oligonucleotide
  Target: SCNA; (+) strand; PAM type: YTN; PAM sequence: TTT
cagtgttcctgatcttaaaa

SEQ ID NO: 79859 - DNA, 20 bp, Artificial Sequence
  Description of Artificial Sequence: Synthetic oligonucleotide
  Target: SCNA; (+) strand; PAM type: YTN; PAM sequence: TTC
agtgttcctgatcttaaaag

SEQ ID NO: 79860 - DNA, 20 bp, Artificial Sequence
  Description of Artificial Sequence: Synthetic oligonucleotide
  Target: SCNA; (+) strand; PAM type: YTN; PAM sequence: TTC
ctgatcttaaaagcagagcc

SEQ ID NO: 79861 - DNA, 20 bp, Artificial Sequence
  Description of Artificial Sequence: Synthetic oligonucleotide
  Target: SCNA; (+) strand; PAM type: YTN; PAM sequence: CTG
atcttaaaagcagagccatt

SEQ ID NO: 79862 - DNA, 20 bp, Artificial Sequence
  Description of Artificial Sequence: Synthetic oligonucleotide
  Target: SCNA; (+) strand; PAM type: YTN; PAM sequence: CTT
aaaagcagagccattaatcc

SEQ ID NO: 79863 - DNA, 20 bp, Artificial Sequence
  Description of Artificial Sequence: Synthetic oligonucleotide
  Target: SCNA; (+) strand; PAM type: YTN; PAM sequence: TTA
aaagcagagccattaatcca

SEQ ID NO: 79864 - DNA, 20 bp, Artificial Sequence
  Description of Artificial Sequence: Synthetic oligonucleotide
  Target: SCNA; (+) strand; PAM type: YTN; PAM sequence: TTA
atccacttctacaagctaga

SEQ ID NO: 79865 - DNA, 20 bp, Artificial Sequence
  Description of Artificial Sequence: Synthetic oligonucleotide
  Target: SCNA; (+) strand; PAM type: YTN; PAM sequence: CTT
ctacaagctagacatccagt

SEQ ID NO: 79866 - DNA, 20 bp, Artificial Sequence
  Description of Artificial Sequence: Synthetic oligonucleotide
  Target: SCNA; (+) strand; PAM type: YTN; PAM sequence: TTC
tacaagctagacatccagta

SEQ ID NO: 79867 - DNA, 20 bp, Artificial Sequence
  Description of Artificial Sequence: Synthetic oligonucleotide
  Target: SCNA; (+) strand; PAM type: YTN; PAM sequence: CTA
caagctagacatccagtacc

SEQ ID NO: 79868 - DNA, 20 bp, Artificial Sequence
  Description of Artificial Sequence: Synthetic oligonucleotide
  Target: SCNA; (+) strand; PAM type: YTN; PAM sequence: CTA
gacatccagtacccctactt

SEQ ID NO: 79869 - DNA, 20 bp, Artificial Sequence
  Description of Artificial Sequence: Synthetic oligonucleotide
  Target: SCNA; (+) strand; PAM type: YTN; PAM sequence: CTA
cttgtcacatccctcttcct

SEQ ID NO: 79870 - DNA, 20 bp, Artificial Sequence
  Description of Artificial Sequence: Synthetic oligonucleotide
  Target: SCNA; (+) strand; PAM type: YTN; PAM sequence: CTT
gtcacatccctcttcctcca

SEQ ID NO: 79871 - DNA, 20 bp, Artificial Sequence
  Description of Artificial Sequence: Synthetic oligonucleotide
  Target: SCNA; (+) strand; PAM type: YTN; PAM sequence: TTG
tcacatccctcttcctccaa

SEQ ID NO: 79872 - DNA, 20 bp, Artificial Sequence
  Description of Artificial Sequence: Synthetic oligonucleotide
  Target: SCNA; (+) strand; PAM type: YTN; PAM sequence: CTC
ttcctccaagtttctggcac

SEQ ID NO: 79873 - DNA, 20 bp, Artificial Sequence
  Description of Artificial Sequence: Synthetic oligonucleotide
  Target: SCNA; (+) strand; PAM type: YTN; PAM sequence: CTT
cctccaagtttctggcacag

SEQ ID NO: 79874 - DNA, 20 bp, Artificial Sequence
  Description of Artificial Sequence: Synthetic oligonucleotide
  Target: SCNA; (+) strand; PAM type: YTN; PAM sequence: TTC
ctccaagtttctggcacagt

SEQ ID NO: 79875 - DNA, 20 bp, Artificial Sequence
  Description of Artificial Sequence: Synthetic oligonucleotide
  Target: SCNA; (+) strand; PAM type: YTN; PAM sequence: CTC
caagtttctggcacagtgtg

SEQ ID NO: 79876 - DNA, 20 bp, Artificial Sequence
  Description of Artificial Sequence: Synthetic oligonucleotide
  Target: SCNA; (+) strand; PAM type: YTN; PAM sequence: TTT
ctggcacagtgtgagcaaac

SEQ ID NO: 79877 - DNA, 20 bp, Artificial Sequence
  Description of Artificial Sequence: Synthetic oligonucleotide
  Target: SCNA; (+) strand; PAM type: YTN; PAM sequence: TTC
tggcacagtgtgagcaaaca

SEQ ID NO: 79878 - DNA, 20 bp, Artificial Sequence
  Description of Artificial Sequence: Synthetic oligonucleotide
  Target: SCNA; (+) strand; PAM type: YTN; PAM sequence: CTG
gcacagtgtgagcaaacatt

SEQ ID NO: 79879 - DNA, 20 bp, Artificial Sequence
  Description of Artificial Sequence: Synthetic oligonucleotide
  Target: SCNA; (+) strand; PAM type: YTN; PAM sequence: TTC
tttcttgaatgatgaatgag

SEQ ID NO: 79880 - DNA, 20 bp, Artificial Sequence
  Description of Artificial Sequence: Synthetic oligonucleotide
  Target: SCNA; (+) strand; PAM type: YTN; PAM sequence: CTT
tcttgaatgatgaatgagtg

SEQ ID NO: 79881 - DNA, 20 bp, Artificial Sequence
  Description of Artificial Sequence: Synthetic oligonucleotide
  Target: SCNA; (+) strand; PAM type: YTN; PAM sequence: TTT
cttgaatgatgaatgagtgt

SEQ ID NO: 79882 - DNA, 20 bp, Artificial Sequence
  Description of Artificial Sequence: Synthetic oligonucleotide
  Target: SCNA; (+) strand; PAM type: YTN; PAM sequence: TTC
ttgaatgatgaatgagtgtc

SEQ ID NO: 79883 - DNA, 20 bp, Artificial Sequence
  Description of Artificial Sequence: Synthetic oligonucleotide
  Target: SCNA; (+) strand; PAM type: YTN; PAM sequence: CTT
gaatgatgaatgagtgtctc

SEQ ID NO: 79884 - DNA, 20 bp, Artificial Sequence
  Description of Artificial Sequence: Synthetic oligonucleotide
  Target: SCNA; (+) strand; PAM type: YTN; PAM sequence: TTG
aatgatgaatgagtgtctca

SEQ ID NO: 79885 - DNA, 20 bp, Artificial Sequence
  Description of Artificial Sequence: Synthetic oligonucleotide
  Target: SCNA; (+) strand; PAM type: YTN; PAM sequence: CTC
aatgcagtcattaataagca

SEQ ID NO: 79886 - DNA, 20 bp, Artificial Sequence
  Description of Artificial Sequence: Synthetic oligonucleotide
  Target: SCNA; (+) strand; PAM type: YTN; PAM sequence: TTA
ataagcatttcaagcaaaaa

SEQ ID NO: 79887 - DNA, 20 bp, Artificial Sequence
  Description of Artificial Sequence: Synthetic oligonucleotide
  Target: SCNA; (+) strand; PAM type: YTN; PAM sequence: TTT
caagcaaaaagagtttgctt

SEQ ID NO: 79888 - DNA, 20 bp, Artificial Sequence
  Description of Artificial Sequence: Synthetic oligonucleotide
  Target: SCNA; (+) strand; PAM type: YTN; PAM sequence: TTC
aagcaaaaagagtttgctta

SEQ ID NO: 79889 - DNA, 20 bp, Artificial Sequence
  Description of Artificial Sequence: Synthetic oligonucleotide
  Target: SCNA; (+) strand; PAM type: YTN; PAM sequence: TTT
gcttatttctatttaccagg

SEQ ID NO: 79890 - DNA, 20 bp, Artificial Sequence
  Description of Artificial Sequence: Synthetic oligonucleotide
  Target: SCNA; (+) strand; PAM type: YTN; PAM sequence: TTG
cttatttctatttaccaggg

SEQ ID NO: 79891 - DNA, 20 bp, Artificial Sequence
  Description of Artificial Sequence: Synthetic oligonucleotide
  Target: SCNA; (+) strand; PAM type: YTN; PAM sequence: CTT
atttctatttaccagggtca

SEQ ID NO: 79892 - DNA, 20 bp, Artificial Sequence
  Description of Artificial Sequence: Synthetic oligonucleotide
  Target: SCNA; (+) strand; PAM type: YTN; PAM sequence: TTA
tttctatttaccagggtcat

SEQ ID NO: 79893 - DNA, 20 bp, Artificial Sequence
  Description of Artificial Sequence: Synthetic oligonucleotide
  Target: SCNA; (+) strand; PAM type: YTN; PAM sequence: TTT
ctatttaccagggtcatttt

SEQ ID NO: 79894 - DNA, 20 bp, Artificial Sequence
  Description of Artificial Sequence: Synthetic oligonucleotide
  Target: SCNA; (+) strand; PAM type: YTN; PAM sequence: TTC
tatttaccagggtcattttg

SEQ ID NO: 79895 - DNA, 20 bp, Artificial Sequence
  Description of Artificial Sequence: Synthetic oligonucleotide
  Target: SCNA; (+) strand; PAM type: YTN; PAM sequence: CTA
tttaccagggtcattttgat

SEQ ID NO: 79896 - DNA, 20 bp, Artificial Sequence
  Description of Artificial Sequence: Synthetic oligonucleotide
  Target: SCNA; (+) strand; PAM type: YTN; PAM sequence: TTT
accagggtcattttgatcaa

SEQ ID NO: 79897 - DNA, 20 bp, Artificial Sequence
  Description of Artificial Sequence: Synthetic oligonucleotide
  Target: SCNA; (+) strand; PAM type: YTN; PAM sequence: TTA
ccagggtcattttgatcaaa

SEQ ID NO: 79898 - DNA, 20 bp, Artificial Sequence
  Description of Artificial Sequence: Synthetic oligonucleotide
  Target: SCNA; (+) strand; PAM type: YTN; PAM sequence: TTT
tgatcaaagtttaaaaaatg

SEQ ID NO: 79899 - DNA, 20 bp, Artificial Sequence
  Description of Artificial Sequence: Synthetic oligonucleotide
  Target: SCNA; (+) strand; PAM type: YTN; PAM sequence: TTT
gatcaaagtttaaaaaatga

SEQ ID NO: 79900 - DNA, 20 bp, Artificial Sequence
  Description of Artificial Sequence: Synthetic oligonucleotide
  Target: SCNA; (+) strand; PAM type: YTN; PAM sequence: TTG
atcaaagtttaaaaaatgaa

SEQ ID NO: 79901 - DNA, 20 bp, Artificial Sequence
  Description of Artificial Sequence: Synthetic oligonucleotide
  Target: SCNA; (+) strand; PAM type: YTN; PAM sequence: TTT
aaaaaatgaaataaattatt

SEQ ID NO: 79902 - DNA, 20 bp, Artificial Sequence
  Description of Artificial Sequence: Synthetic oligonucleotide
  Target: SCNA; (+) strand; PAM type: YTN; PAM sequence: TTA
aaaaatgaaataaattattt

SEQ ID NO: 79903 - DNA, 20 bp, Artificial Sequence
  Description of Artificial Sequence: Synthetic oligonucleotide
  Target: SCNA; (+) strand; PAM type: YTN; PAM sequence: TTA
tttcaaagttcataatgaac

SEQ ID NO: 79904 - DNA, 20 bp, Artificial Sequence
  Description of Artificial Sequence: Synthetic oligonucleotide
  Target: SCNA; (+) strand; PAM type: YTN; PAM sequence: TTT
caaagttcataatgaacaaa

SEQ ID NO: 79905 - DNA, 20 bp, Artificial Sequence
  Description of Artificial Sequence: Synthetic oligonucleotide
  Target: SCNA; (+) strand; PAM type: YTN; PAM sequence: TTC
aaagttcataatgaacaaat

SEQ ID NO: 79906 - DNA, 20 bp, Artificial Sequence
  Description of Artificial Sequence: Synthetic oligonucleotide
  Target: SCNA; (+) strand; PAM type: YTN; PAM sequence: TTC
ataatgaacaaattaaatac

SEQ ID NO: 79907 - DNA, 20 bp, Artificial Sequence
  Description of Artificial Sequence: Synthetic oligonucleotide
  Target: SCNA; (+) strand; PAM type: YTN; PAM sequence: TTA
aatactttcattgaaaccat

SEQ ID NO: 79908 - DNA, 20 bp, Artificial Sequence
  Description of Artificial Sequence: Synthetic oligonucleotide
  Target: SCNA; (+) strand; PAM type: YTN; PAM sequence: CTT
tcattgaaaccatccagatt

SEQ ID NO: 79909 - DNA, 20 bp, Artificial Sequence
  Description of Artificial Sequence: Synthetic oligonucleotide
  Target: SCNA; (+) strand; PAM type: YTN; PAM sequence: TTT
cattgaaaccatccagattt

SEQ ID NO: 79910 - DNA, 20 bp, Artificial Sequence
  Description of Artificial Sequence: Synthetic oligonucleotide
  Target: SCNA; (+) strand; PAM type: YTN; PAM sequence: TTC
attgaaaccatccagatttt

SEQ ID NO: 79911 - DNA, 20 bp, Artificial Sequence
  Description of Artificial Sequence: Synthetic oligonucleotide
  Target: SCNA; (+) strand; PAM type: YTN; PAM sequence: TTG
aaaccatccagattttttag

SEQ ID NO: 79912 - DNA, 20 bp, Artificial Sequence
  Description of Artificial Sequence: Synthetic oligonucleotide
  Target: SCNA; (+) strand; PAM type: YTN; PAM sequence: TTT
tttagcatcccatagatgtg

SEQ ID NO: 79913 - DNA, 20 bp, Artificial Sequence
  Description of Artificial Sequence: Synthetic oligonucleotide
  Target: SCNA; (+) strand; PAM type: YTN; PAM sequence: TTT
ttagcatcccatagatgtga

SEQ ID NO: 79914 - DNA, 20 bp, Artificial Sequence
  Description of Artificial Sequence: Synthetic oligonucleotide
  Target: SCNA; (+) strand; PAM type: YTN; PAM sequence: TTT
tagcatcccatagatgtgac

SEQ ID NO: 79915 - DNA, 20 bp, Artificial Sequence
  Description of Artificial Sequence: Synthetic oligonucleotide
  Target: SCNA; (+) strand; PAM type: YTN; PAM sequence: TTT
agcatcccatagatgtgacc

SEQ ID NO: 79916 - DNA, 20 bp, Artificial Sequence
  Description of Artificial Sequence: Synthetic oligonucleotide
  Target: SCNA; (+) strand; PAM type: YTN; PAM sequence: TTA
gcatcccatagatgtgacca

SEQ ID NO: 79917 - DNA, 20 bp, Artificial Sequence
  Description of Artificial Sequence: Synthetic oligonucleotide
  Target: SCNA; (+) strand; PAM type: YTN; PAM sequence: TTG
cagacatttattagagtatt

SEQ ID NO: 79918 - DNA, 20 bp, Artificial Sequence
  Description of Artificial Sequence: Synthetic oligonucleotide
  Target: SCNA; (+) strand; PAM type: YTN; PAM sequence: TTT
attagagtattctttgaatt

SEQ ID NO: 79919 - DNA, 20 bp, Artificial Sequence
  Description of Artificial Sequence: Synthetic oligonucleotide
  Target: SCNA; (+) strand; PAM type: YTN; PAM sequence: TTA
ttagagtattctttgaatta

SEQ ID NO: 79920 - DNA, 20 bp, Artificial Sequence
  Description of Artificial Sequence: Synthetic oligonucleotide
  Target: SCNA; (+) strand; PAM type: YTN; PAM sequence: TTA
gagtattctttgaattatta

SEQ ID NO: 79921 - DNA, 20 bp, Artificial Sequence
  Description of Artificial Sequence: Synthetic oligonucleotide
  Target: SCNA; (+) strand; PAM type: YTN; PAM sequence: TTC
tttgaattattatagaaact

SEQ ID NO: 79922 - DNA, 20 bp, Artificial Sequence
  Description of Artificial Sequence: Synthetic oligonucleotide
  Target: SCNA; (+) strand; PAM type: YTN; PAM sequence: CTT
tgaattattatagaaactca

SEQ ID NO: 79923 - DNA, 20 bp, Artificial Sequence
  Description of Artificial Sequence: Synthetic oligonucleotide
  Target: SCNA; (+) strand; PAM type: YTN; PAM sequence: TTT
gaattattatagaaactcag

SEQ ID NO: 79924 - DNA, 20 bp, Artificial Sequence
  Description of Artificial Sequence: Synthetic oligonucleotide
  Target: SCNA; (+) strand; PAM type: YTN; PAM sequence: TTG
aattattatagaaactcaga

SEQ ID NO: 79925 - DNA, 20 bp, Artificial Sequence
  Description of Artificial Sequence: Synthetic oligonucleotide
  Target: SCNA; (+) strand; PAM type: YTN; PAM sequence: TTA
ttatagaaactcagaacttt

SEQ ID NO: 79926 - DNA, 20 bp, Artificial Sequence
  Description of Artificial Sequence: Synthetic oligonucleotide
  Target: SCNA; (+) strand; PAM type: YTN; PAM sequence: TTA
tagaaactcagaactttatt

SEQ ID NO: 79927 - DNA, 20 bp, Artificial Sequence
  Description of Artificial Sequence: Synthetic oligonucleotide
  Target: SCNA; (+) strand; PAM type: YTN; PAM sequence: CTC
agaactttattgctaaatta

SEQ ID NO: 79928 - DNA, 20 bp, Artificial Sequence
  Description of Artificial Sequence: Synthetic oligonucleotide
  Target: SCNA; (+) strand; PAM type: YTN; PAM sequence: CTT
tattgctaaattagacttca

SEQ ID NO: 79929 - DNA, 20 bp, Artificial Sequence
  Description of Artificial Sequence: Synthetic oligonucleotide
  Target: SCNA; (+) strand; PAM type: YTN; PAM sequence: TTT
attgctaaattagacttcaa

SEQ ID NO: 79930 - DNA, 20 bp, Artificial Sequence
  Description of Artificial Sequence: Synthetic oligonucleotide
  Target: SCNA; (+) strand; PAM type: YTN; PAM sequence: TTA
ttgctaaattagacttcaac

SEQ ID NO: 79931 - DNA, 20 bp, Artificial Sequence
  Description of Artificial Sequence: Synthetic oligonucleotide
  Target: SCNA; (+) strand; PAM type: YTN; PAM sequence: TTG
ctaaattagacttcaacaat

SEQ ID NO: 79932 - DNA, 20 bp, Artificial Sequence
  Description of Artificial Sequence: Synthetic oligonucleotide
  Target: SCNA; (+) strand; PAM type: YTN; PAM sequence: CTA
aattagacttcaacaatttt

SEQ ID NO: 79933 - DNA, 20 bp, Artificial Sequence
  Description of Artificial Sequence: Synthetic oligonucleotide
  Target: SCNA; (+) strand; PAM type: YTN; PAM sequence: TTA
gacttcaacaattttctagt

SEQ ID NO: 79934 - DNA, 20 bp, Artificial Sequence
  Description of Artificial Sequence: Synthetic oligonucleotide
  Target: SCNA; (+) strand; PAM type: YTN; PAM sequence: CTT
caacaattttctagtagagc

SEQ ID NO: 79935 - DNA, 20 bp, Artificial Sequence
  Description of Artificial Sequence: Synthetic oligonucleotide
  Target: SCNA; (+) strand; PAM type: YTN; PAM sequence: TTC
aacaattttctagtagagct

SEQ ID NO: 79936 - DNA, 20 bp, Artificial Sequence
  Description of Artificial Sequence: Synthetic oligonucleotide
  Target: SCNA; (+) strand; PAM type: YTN; PAM sequence: TTT
tctagtagagcttcctcatt

SEQ ID NO: 79937 - DNA, 20 bp, Artificial Sequence
  Description of Artificial Sequence: Synthetic oligonucleotide
  Target: SCNA; (+) strand; PAM type: YTN; PAM sequence: TTT
ctagtagagcttcctcattt

SEQ ID NO: 79938 - DNA, 20 bp, Artificial Sequence
  Description of Artificial Sequence: Synthetic oligonucleotide
  Target: SCNA; (+) strand; PAM type: YTN; PAM sequence: TTC
tagtagagcttcctcatttt

SEQ ID NO: 79939 - DNA, 20 bp, Artificial Sequence
  Description of Artificial Sequence: Synthetic oligonucleotide
  Target: SCNA; (+) strand; PAM type: YTN; PAM sequence: CTA
gtagagcttcctcattttat

SEQ ID NO: 79940 - DNA, 20 bp, Artificial Sequence
  Description of Artificial Sequence: Synthetic oligonucleotide
  Target: SCNA; (+) strand; PAM type: YTN; PAM sequence: CTT
cctcattttatgagaaagac

SEQ ID NO: 79941 - DNA, 20 bp, Artificial Sequence
  Description of Artificial Sequence: Synthetic oligonucleotide
  Target: SCNA; (+) strand; PAM type: YTN; PAM sequence: TTC
ctcattttatgagaaagact

SEQ ID NO: 79942 - DNA, 20 bp, Artificial Sequence
  Description of Artificial Sequence: Synthetic oligonucleotide
  Target: SCNA; (+) strand; PAM type: YTN; PAM sequence: CTC
attttatgagaaagactttt

SEQ ID NO: 79943 - DNA, 20 bp, Artificial Sequence
  Description of Artificial Sequence: Synthetic oligonucleotide
  Target: SCNA; (+) strand; PAM type: YTN; PAM sequence: TTT
tatgagaaagacttttagga

SEQ ID NO: 79944 - DNA, 20 bp, Artificial Sequence
  Description of Artificial Sequence: Synthetic oligonucleotide
  Target: SCNA; (+) strand; PAM type: YTN; PAM sequence: TTT
atgagaaagacttttaggag

SEQ ID NO: 79945 - DNA, 20 bp, Artificial Sequence
  Description of Artificial Sequence: Synthetic oligonucleotide
  Target: SCNA; (+) strand; PAM type: YTN; PAM sequence: TTA
tgagaaagacttttaggaga

SEQ ID NO: 79946 - DNA, 20 bp, Artificial Sequence
  Description of Artificial Sequence: Synthetic oligonucleotide
  Target: SCNA; (+) strand; PAM type: YTN; PAM sequence: CTT
ttaggagatctgcgaaaggt

SEQ ID NO: 79947 - DNA, 20 bp, Artificial Sequence
  Description of Artificial Sequence: Synthetic oligonucleotide
  Target: SCNA; (+) strand; PAM type: YTN; PAM sequence: TTT
taggagatctgcgaaaggtt

SEQ ID NO: 79948 - DNA, 20 bp, Artificial Sequence
  Description of Artificial Sequence: Synthetic oligonucleotide
  Target: SCNA; (+) strand; PAM type: YTN; PAM sequence: TTT
aggagatctgcgaaaggtta

SEQ ID NO: 79949 - DNA, 20 bp, Artificial Sequence
  Description of Artificial Sequence: Synthetic oligonucleotide
  Target: SCNA; (+) strand; PAM type: YTN; PAM sequence: TTA
ggagatctgcgaaaggttat

SEQ ID NO: 79950 - DNA, 20 bp, Artificial Sequence
  Description of Artificial Sequence: Synthetic oligonucleotide
  Target: SCNA; (+) strand; PAM type: YTN; PAM sequence: CTG
cgaaaggttatccagtcagg

SEQ ID NO: 79951 - DNA, 20 bp, Artificial Sequence
  Description of Artificial Sequence: Synthetic oligonucleotide
  Target: SCNA; (+) strand; PAM type: YTN; PAM sequence: TTA
tccagtcaggtggtgtatga

SEQ ID NO: 79952 - DNA, 20 bp, Artificial Sequence
  Description of Artificial Sequence: Synthetic oligonucleotide
  Target: SCNA; (+) strand; PAM type: YTN; PAM sequence: CTA
gccattttcactctcagtcc

SEQ ID NO: 79953 - DNA, 20 bp, Artificial Sequence
  Description of Artificial Sequence: Synthetic oligonucleotide
  Target: SCNA; (+) strand; PAM type: YTN; PAM sequence: TTT
tcactctcagtccaatgttt

SEQ ID NO: 79954 - DNA, 20 bp, Artificial Sequence
  Description of Artificial Sequence: Synthetic oligonucleotide
  Target: SCNA; (+) strand; PAM type: YTN; PAM sequence: TTT
cactctcagtccaatgttta

SEQ ID NO: 79955 - DNA, 20 bp, Artificial Sequence
  Description of Artificial Sequence: Synthetic oligonucleotide
  Target: SCNA; (+) strand; PAM type: YTN; PAM sequence: TTC
actctcagtccaatgtttat

SEQ ID NO: 79956 - DNA, 20 bp, Artificial Sequence
  Description of Artificial Sequence: Synthetic oligonucleotide
  Target: SCNA; (+) strand; PAM type: YTN; PAM sequence: CTC
tcagtccaatgtttatttcc

SEQ ID NO: 79957 - DNA, 20 bp, Artificial Sequence
  Description of Artificial Sequence: Synthetic oligonucleotide
  Target: SCNA; (+) strand; PAM type: YTN; PAM sequence: CTC
agtccaatgtttatttccac

SEQ ID NO: 79958 - DNA, 20 bp, Artificial Sequence
  Description of Artificial Sequence: Synthetic oligonucleotide
  Target: SCNA; (+) strand; PAM type: YTN; PAM sequence: TTT
atttccacaactatgctgca

SEQ ID NO: 79959 - DNA, 20 bp, Artificial Sequence
  Description of Artificial Sequence: Synthetic oligonucleotide
  Target: SCNA; (+) strand; PAM type: YTN; PAM sequence: TTA
tttccacaactatgctgcaa

SEQ ID NO: 79960 - DNA, 20 bp, Artificial Sequence
  Description of Artificial Sequence: Synthetic oligonucleotide
  Target: SCNA; (+) strand; PAM type: YTN; PAM sequence: TTT
ccacaactatgctgcaattt

SEQ ID NO: 79961 - DNA, 20 bp, Artificial Sequence
  Description of Artificial Sequence: Synthetic oligonucleotide
  Target: SCNA; (+) strand; PAM type: YTN; PAM sequence: TTC
cacaactatgctgcaatttc

SEQ ID NO: 79962 - DNA, 20 bp, Artificial Sequence
  Description of Artificial Sequence: Synthetic oligonucleotide
  Target: SCNA; (+) strand; PAM type: YTN; PAM sequence: CTA
tgctgcaatttctaggttct

SEQ ID NO: 79963 - DNA, 20 bp, Artificial Sequence
  Description of Artificial Sequence: Synthetic oligonucleotide
  Target: SCNA; (+) strand; PAM type: YTN; PAM sequence: CTG
caatttctaggttctatggc

SEQ ID NO: 79964 - DNA, 20 bp, Artificial Sequence
  Description of Artificial Sequence: Synthetic oligonucleotide
  Target: SCNA; (+) strand; PAM type: YTN; PAM sequence: TTT
ctaggttctatggcttcatt

SEQ ID NO: 79965 - DNA, 20 bp, Artificial Sequence
  Description of Artificial Sequence: Synthetic oligonucleotide
  Target: SCNA; (+) strand; PAM type: YTN; PAM sequence: TTC
taggttctatggcttcattt

SEQ ID NO: 79966 - DNA, 20 bp, Artificial Sequence
  Description of Artificial Sequence: Synthetic oligonucleotide
  Target: SCNA; (+) strand; PAM type: YTN; PAM sequence: CTA
ggttctatggcttcattttc

SEQ ID NO: 79967 - DNA, 20 bp, Artificial Sequence
  Description of Artificial Sequence: Synthetic oligonucleotide
  Target: SCNA; (+) strand; PAM type: YTN; PAM sequence: TTC
tatggcttcattttcatatt

SEQ ID NO: 79968 - DNA, 20 bp, Artificial Sequence
  Description of Artificial Sequence: Synthetic oligonucleotide
  Target: SCNA; (+) strand; PAM type: YTN; PAM sequence: CTA
tggcttcattttcatattag

SEQ ID NO: 79969 - DNA, 20 bp, Artificial Sequence
  Description of Artificial Sequence: Synthetic oligonucleotide
  Target: SCNA; (+) strand; PAM type: YTN; PAM sequence: CTT
cattttcatattagaaatca

SEQ ID NO: 79970 - DNA, 20 bp, Artificial Sequence
  Description of Artificial Sequence: Synthetic oligonucleotide
  Target: SCNA; (+) strand; PAM type: YTN; PAM sequence: TTC
attttcatattagaaatcag

SEQ ID NO: 79971 - DNA, 20 bp, Artificial Sequence
  Description of Artificial Sequence: Synthetic oligonucleotide
  Target: SCNA; (+) strand; PAM type: YTN; PAM sequence: TTT
tcatattagaaatcagtaag

SEQ ID NO: 79972 - DNA, 20 bp, Artificial Sequence
  Description of Artificial Sequence: Synthetic oligonucleotide
  Target: SCNA; (+) strand; PAM type: YTN; PAM sequence: TTT
catattagaaatcagtaaga

SEQ ID NO: 79973 - DNA, 20 bp, Artificial Sequence
  Description of Artificial Sequence: Synthetic oligonucleotide
  Target: SCNA; (+) strand; PAM type: YTN; PAM sequence: TTC
atattagaaatcagtaagaa

SEQ ID NO: 79974 - DNA, 20 bp, Artificial Sequence
  Description of Artificial Sequence: Synthetic oligonucleotide
  Target: SCNA; (+) strand; PAM type: YTN; PAM sequence: TTA
gaaatcagtaagaaactata

SEQ ID NO: 79975 - DNA, 20 bp, Artificial Sequence
  Description of Artificial Sequence: Synthetic oligonucleotide
  Target: SCNA; (+) strand; PAM type: YTN; PAM sequence: CTA
tactacctataagggaaata

SEQ ID NO: 79976 - DNA, 20 bp, Artificial Sequence
  Description of Artificial Sequence: Synthetic oligonucleotide
  Target: SCNA; (+) strand; PAM type: YTN; PAM sequence: CTA
cctataagggaaatatctcc

SEQ ID NO: 79977 - DNA, 20 bp, Artificial Sequence
  Description of Artificial Sequence: Synthetic oligonucleotide
  Target: SCNA; (+) strand; PAM type: YTN; PAM sequence: CTA
taagggaaatatctccaaat

SEQ ID NO: 79978 - DNA, 20 bp, Artificial Sequence
  Description of Artificial Sequence: Synthetic oligonucleotide
  Target: SCNA; (+) strand; PAM type: YTN; PAM sequence: CTC
caaatgattaattttgtcac

SEQ ID NO: 79979 - DNA, 20 bp, Artificial Sequence
  Description of Artificial Sequence: Synthetic oligonucleotide
  Target: SCNA; (+) strand; PAM type: YTN; PAM sequence: TTA
attttgtcacatcacttaga

SEQ ID NO: 79980 - DNA, 20 bp, Artificial Sequence
  Description of Artificial Sequence: Synthetic oligonucleotide
  Target: SCNA; (+) strand; PAM type: YTN; PAM sequence: TTT
tgtcacatcacttagatttc

SEQ ID NO: 79981 - DNA, 20 bp, Artificial Sequence
  Description of Artificial Sequence: Synthetic oligonucleotide
  Target: SCNA; (+) strand; PAM type: YTN; PAM sequence: TTT
gtcacatcacttagatttct

SEQ ID NO: 79982 - DNA, 20 bp, Artificial Sequence
  Description of Artificial Sequence: Synthetic oligonucleotide
  Target: SCNA; (+) strand; PAM type: YTN; PAM sequence: TTG
tcacatcacttagatttctg

SEQ ID NO: 79983 - DNA, 20 bp, Artificial Sequence
  Description of Artificial Sequence: Synthetic oligonucleotide
  Target: SCNA; (+) strand; PAM type: YTN; PAM sequence: CTT
agatttctgctttaaatatt

SEQ ID NO: 79984 - DNA, 20 bp, Artificial Sequence
  Description of Artificial Sequence: Synthetic oligonucleotide
  Target: SCNA; (+) strand; PAM type: YTN; PAM sequence: TTA
gatttctgctttaaatatta

SEQ ID NO: 79985 - DNA, 20 bp, Artificial Sequence
  Description of Artificial Sequence: Synthetic oligonucleotide
  Target: SCNA; (+) strand; PAM type: YTN; PAM sequence: TTT
ctgctttaaatattaaaata

SEQ ID NO: 79986 - DNA, 20 bp, Artificial Sequence
  Description of Artificial Sequence: Synthetic oligonucleotide
  Target: SCNA; (+) strand; PAM type: YTN; PAM sequence: TTC
tgctttaaatattaaaataa

SEQ ID NO: 79987 - DNA, 20 bp, Artificial Sequence
  Description of Artificial Sequence: Synthetic oligonucleotide
  Target: SCNA; (+) strand; PAM type: YTN; PAM sequence: CTG
ctttaaatattaaaataaat

SEQ ID NO: 79988 - DNA, 20 bp, Artificial Sequence
  Description of Artificial Sequence: Synthetic oligonucleotide
  Target: SCNA; (+) strand; PAM type: YTN; PAM sequence: CTT
taaatattaaaataaataga

SEQ ID NO: 79989 - DNA, 20 bp, Artificial Sequence
  Description of Artificial Sequence: Synthetic oligonucleotide
  Target: SCNA; (+) strand; PAM type: YTN; PAM sequence: TTT
aaatattaaaataaatagaa

SEQ ID NO: 79990 - DNA, 20 bp, Artificial Sequence
  Description of Artificial Sequence: Synthetic oligonucleotide
  Target: SCNA; (+) strand; PAM type: YTN; PAM sequence: TTA
aatattaaaataaatagaag

SEQ ID NO: 79991 - DNA, 20 bp, Artificial Sequence
  Description of Artificial Sequence: Synthetic oligonucleotide
  Target: SCNA; (+) strand; PAM type: YTN; PAM sequence: TTA
aaataaatagaagtattttt

SEQ ID NO: 79992 - DNA, 20 bp, Artificial Sequence
  Description of Artificial Sequence: Synthetic oligonucleotide
  Target: SCNA; (+) strand; PAM type: YTN; PAM sequence: TTT
ttagatgggtggaaagcaaa

SEQ ID NO: 79993 - DNA, 20 bp, Artificial Sequence
  Description of Artificial Sequence: Synthetic oligonucleotide
  Target: SCNA; (+) strand; PAM type: YTN; PAM sequence: TTT
tagatgggtggaaagcaaac

SEQ ID NO: 79994 - DNA, 20 bp, Artificial Sequence
  Description of Artificial Sequence: Synthetic oligonucleotide
  Target: SCNA; (+) strand; PAM type: YTN; PAM sequence: TTT
agatgggtggaaagcaaacc

SEQ ID NO: 79995 - DNA, 20 bp, Artificial Sequence
  Description of Artificial Sequence: Synthetic oligonucleotide
  Target: SCNA; (+) strand; PAM type: YTN; PAM sequence: TTA
gatgggtggaaagcaaaccc

SEQ ID NO: 79996 - DNA, 20 bp, Artificial Sequence
  Description of Artificial Sequence: Synthetic oligonucleotide
  Target: SCNA; (+) strand; PAM type: YTN; PAM sequence: TTT
tgtaaaagattaagcacttt

SEQ ID NO: 79997 - DNA, 20 bp, Artificial Sequence
  Description of Artificial Sequence: Synthetic oligonucleotide
  Target: SCNA; (+) strand; PAM type: YTN; PAM sequence: TTT
gtaaaagattaagcactttc

SEQ ID NO: 79998 - DNA, 20 bp, Artificial Sequence
  Description of Artificial Sequence: Synthetic oligonucleotide
  Target: SCNA; (+) strand; PAM type: YTN; PAM sequence: TTG
taaaagattaagcactttca

SEQ ID NO: 79999 - DNA, 20 bp, Artificial Sequence
  Description of Artificial Sequence: Synthetic oligonucleotide
  Target: SCNA; (+) strand; PAM type: YTN; PAM sequence: TTA
agcactttcatgctccattt

SEQ ID NO: 80000 - DNA, 20 bp, Artificial Sequence
  Description of Artificial Sequence: Synthetic oligonucleotide
  Target: SCNA; (+) strand; PAM type: YTN; PAM sequence: CTT
tcatgctccatttgcaattt

SEQ ID NO: 80001 - DNA, 20 bp, Artificial Sequence
  Description of Artificial Sequence: Synthetic oligonucleotide
  Target: SCNA; (+) strand; PAM type: YTN; PAM sequence: TTT
catgctccatttgcaattta

SEQ ID NO: 80002 - DNA, 20 bp, Artificial Sequence
  Description of Artificial Sequence: Synthetic oligonucleotide
  Target: SCNA; (+) strand; PAM type: YTN; PAM sequence: TTC
atgctccatttgcaatttat

SEQ ID NO: 80003 - DNA, 20 bp, Artificial Sequence
  Description of Artificial Sequence: Synthetic oligonucleotide
  Target: SCNA; (+) strand; PAM type: YTN; PAM sequence: CTC
catttgcaatttatattgta

SEQ ID NO: 80004 - DNA, 20 bp, Artificial Sequence
  Description of Artificial Sequence: Synthetic oligonucleotide
  Target: SCNA; (+) strand; PAM type: YTN; PAM sequence: TTT
gcaatttatattgtatgcct

SEQ ID NO: 80005 - DNA, 20 bp, Artificial Sequence
  Description of Artificial Sequence: Synthetic oligonucleotide
  Target: SCNA; (+) strand; PAM type: YTN; PAM sequence: TTG
caatttatattgtatgcctt

SEQ ID NO: 80006 - DNA, 20 bp, Artificial Sequence
  Description of Artificial Sequence: Synthetic oligonucleotide
  Target: SCNA; (+) strand; PAM type: YTN; PAM sequence: TTT
atattgtatgccttaaatgc

SEQ ID NO: 80007 - DNA, 20 bp, Artificial Sequence
  Description of Artificial Sequence: Synthetic oligonucleotide
  Target: SCNA; (+) strand; PAM type: YTN; PAM sequence: TTA
tattgtatgccttaaatgca

SEQ ID NO: 80008 - DNA, 20 bp, Artificial Sequence
  Description of Artificial Sequence: Synthetic oligonucleotide
  Target: SCNA; (+) strand; PAM type: YTN; PAM sequence: TTG
tatgccttaaatgcaggtga

SEQ ID NO: 80009 - DNA, 20 bp, Artificial Sequence
  Description of Artificial Sequence: Synthetic oligonucleotide
  Target: SCNA; (+) strand; PAM type: YTN; PAM sequence: CTT
aaatgcaggtgaataaaaga

SEQ ID NO: 80010 - DNA, 20 bp, Artificial Sequence
  Description of Artificial Sequence: Synthetic oligonucleotide
  Target: SCNA; (+) strand; PAM type: YTN; PAM sequence: TTA
aatgcaggtgaataaaagac

SEQ ID NO: 80011 - DNA, 20 bp, Artificial Sequence
  Description of Artificial Sequence: Synthetic oligonucleotide
  Target: SCNA; (+) strand; PAM type: YTN; PAM sequence: TTT
ccctgttgcttaatattctg

SEQ ID NO: 80012 - DNA, 20 bp, Artificial Sequence
  Description of Artificial Sequence: Synthetic oligonucleotide
  Target: SCNA; (+) strand; PAM type: YTN; PAM sequence: TTC
cctgttgcttaatattctga

SEQ ID NO: 80013 - DNA, 20 bp, Artificial Sequence
  Description of Artificial Sequence: Synthetic oligonucleotide
  Target: SCNA; (+) strand; PAM type: YTN; PAM sequence: CTG
ttgcttaatattctgaagca

SEQ ID NO: 80014 - DNA, 20 bp, Artificial Sequence
  Description of Artificial Sequence: Synthetic oligonucleotide
  Target: SCNA; (+) strand; PAM type: YTN; PAM sequence: TTG
cttaatattctgaagcaata

SEQ ID NO: 80015 - DNA, 20 bp, Artificial Sequence
  Description of Artificial Sequence: Synthetic oligonucleotide
  Target: SCNA; (+) strand; PAM type: YTN; PAM sequence: CTT
aatattctgaagcaataaaa

SEQ ID NO: 80016 - DNA, 20 bp, Artificial Sequence
  Description of Artificial Sequence: Synthetic oligonucleotide
  Target: SCNA; (+) strand; PAM type: YTN; PAM sequence: TTA
atattctgaagcaataaaat

SEQ ID NO: 80017 - DNA, 20 bp, Artificial Sequence
  Description of Artificial Sequence: Synthetic oligonucleotide
  Target: SCNA; (+) strand; PAM type: YTN; PAM sequence: TTC
tgaagcaataaaatcctcta

SEQ ID NO: 80018 - DNA, 20 bp, Artificial Sequence
  Description of Artificial Sequence: Synthetic oligonucleotide
  Target: SCNA; (+) strand; PAM type: YTN; PAM sequence: CTG
aagcaataaaatcctctagt

SEQ ID NO: 80019 - DNA, 20 bp, Artificial Sequence
  Description of Artificial Sequence: Synthetic oligonucleotide
  Target: SCNA; (+) strand; PAM type: YTN; PAM sequence: CTC
tagttaaatctagttgtcca

SEQ ID NO: 80020 - DNA, 20 bp, Artificial Sequence
  Description of Artificial Sequence: Synthetic oligonucleotide
  Target: SCNA; (+) strand; PAM type: YTN; PAM sequence: CTA
gttaaatctagttgtccata

SEQ ID NO: 80021 - DNA, 20 bp, Artificial Sequence
  Description of Artificial Sequence: Synthetic oligonucleotide
  Target: SCNA; (+) strand; PAM type: YTN; PAM sequence: TTA
aatctagttgtccataactg

SEQ ID NO: 80022 - DNA, 20 bp, Artificial Sequence
  Description of Artificial Sequence: Synthetic oligonucleotide
  Target: SCNA; (+) strand; PAM type: YTN; PAM sequence: CTA
gttgtccataactgaatgta

SEQ ID NO: 80023 - DNA, 20 bp, Artificial Sequence
  Description of Artificial Sequence: Synthetic oligonucleotide
  Target: SCNA; (+) strand; PAM type: YTN; PAM sequence: TTG
tccataactgaatgtataaa

SEQ ID NO: 80024 - DNA, 20 bp, Artificial Sequence
  Description of Artificial Sequence: Synthetic oligonucleotide
  Target: SCNA; (+) strand; PAM type: YTN; PAM sequence: CTG
aatgtataaagacccaaagg

SEQ ID NO: 80025 - DNA, 20 bp, Artificial Sequence
  Description of Artificial Sequence: Synthetic oligonucleotide
  Target: SCNA; (+) strand; PAM type: YTN; PAM sequence: TTT
tgaggaagtgcttggggaag

SEQ ID NO: 80026 - DNA, 20 bp, Artificial Sequence
  Description of Artificial Sequence: Synthetic oligonucleotide
  Target: SCNA; (+) strand; PAM type: YTN; PAM sequence: TTT
gaggaagtgcttggggaagt

SEQ ID NO: 80027 - DNA, 20 bp, Artificial Sequence
  Description of Artificial Sequence: Synthetic oligonucleotide
  Target: SCNA; (+) strand; PAM type: YTN; PAM sequence: TTG
aggaagtgcttggggaagtg

SEQ ID NO: 80028 - DNA, 20 bp, Artificial Sequence
  Description of Artificial Sequence: Synthetic oligonucleotide
  Target: SCNA; (+) strand; PAM type: YTN; PAM sequence: CTT
ggggaagtgatatagtggct

SEQ ID NO: 80029 - DNA, 20 bp, Artificial Sequence
  Description of Artificial Sequence: Synthetic oligonucleotide
  Target: SCNA; (+) strand; PAM type: YTN; PAM sequence: TTG
gggaagtgatatagtggctg

SEQ ID NO: 80030 - DNA, 20 bp, Artificial Sequence
  Description of Artificial Sequence: Synthetic oligonucleotide
  Target: SCNA; (+) strand; PAM type: YTN; PAM sequence: CTG
gaaaagtactactggtgtcc

SEQ ID NO: 80031 - DNA, 20 bp, Artificial Sequence
  Description of Artificial Sequence: Synthetic oligonucleotide
  Target: SCNA; (+) strand; PAM type: YTN; PAM sequence: CTA
ctggtgtccagtctattcca

SEQ ID NO: 80032 - DNA, 20 bp, Artificial Sequence
  Description of Artificial Sequence: Synthetic oligonucleotide
  Target: SCNA; (+) strand; PAM type: YTN; PAM sequence: CTG
gtgtccagtctattccaaat

SEQ ID NO: 80033 - DNA, 20 bp, Artificial Sequence
  Description of Artificial Sequence: Synthetic oligonucleotide
  Target: SCNA; (+) strand; PAM type: YTN; PAM sequence: CTA
ttccaaatgactgtgcaatc

SEQ ID NO: 80034 - DNA, 20 bp, Artificial Sequence
  Description of Artificial Sequence: Synthetic oligonucleotide
  Target: SCNA; (+) strand; PAM type: YTN; PAM sequence: TTC
caaatgactgtgcaatcttg

SEQ ID NO: 80035 - DNA, 20 bp, Artificial Sequence
  Description of Artificial Sequence: Synthetic oligonucleotide
  Target: SCNA; (+) strand; PAM type: YTN; PAM sequence: CTG
tgcaatcttggactacccac

SEQ ID NO: 80036 - DNA, 20 bp, Artificial Sequence
  Description of Artificial Sequence: Synthetic oligonucleotide
  Target: SCNA; (+) strand; PAM type: YTN; PAM sequence: CTT
ggactacccacttcctctgt

SEQ ID NO: 80037 - DNA, 20 bp, Artificial Sequence
  Description of Artificial Sequence: Synthetic oligonucleotide
  Target: SCNA; (+) strand; PAM type: YTN; PAM sequence: TTG
gactacccacttcctctgta

SEQ ID NO: 80038 - DNA, 20 bp, Artificial Sequence
  Description of Artificial Sequence: Synthetic oligonucleotide
  Target: SCNA; (+) strand; PAM type: YTN; PAM sequence: CTA
cccacttcctctgtagattt

SEQ ID NO: 80039 - DNA, 20 bp, Artificial Sequence
  Description of Artificial Sequence: Synthetic oligonucleotide
  Target: SCNA; (+) strand; PAM type: YTN; PAM sequence: CTT
cctctgtagatttctgtttc

SEQ ID NO: 80040 - DNA, 20 bp, Artificial Sequence
  Description of Artificial Sequence: Synthetic oligonucleotide
  Target: SCNA; (+) strand; PAM type: YTN; PAM sequence: TTC
ctctgtagatttctgtttcc

SEQ ID NO: 80041 - DNA, 20 bp, Artificial Sequence
  Description of Artificial Sequence: Synthetic oligonucleotide
  Target: SCNA; (+) strand; PAM type: YTN; PAM sequence: CTC
tgtagatttctgtttcctca

SEQ ID NO: 80042 - DNA, 20 bp, Artificial Sequence
  Description of Artificial Sequence: Synthetic oligonucleotide
  Target: SCNA; (+) strand; PAM type: YTN; PAM sequence: CTG
tagatttctgtttcctcatc

SEQ ID NO: 80043 - DNA, 20 bp, Artificial Sequence
  Description of Artificial Sequence: Synthetic oligonucleotide
  Target: SCNA; (+) strand; PAM type: YTN; PAM sequence: TTT
ctgtttcctcatctctacaa

SEQ ID NO: 80044 - DNA, 20 bp, Artificial Sequence
  Description of Artificial Sequence: Synthetic oligonucleotide
  Target: SCNA; (+) strand; PAM type: YTN; PAM sequence: TTC
tgtttcctcatctctacaat

SEQ ID NO: 80045 - DNA, 20 bp, Artificial Sequence
  Description of Artificial Sequence: Synthetic oligonucleotide
  Target: SCNA; (+) strand; PAM type: YTN; PAM sequence: CTG
tttcctcatctctacaatca

SEQ ID NO: 80046 - DNA, 20 bp, Artificial Sequence
  Description of Artificial Sequence: Synthetic oligonucleotide
  Target: SCNA; (+) strand; PAM type: YTN; PAM sequence: TTT
cctcatctctacaatcagaa

SEQ ID NO: 80047 - DNA, 20 bp, Artificial Sequence
  Description of Artificial Sequence: Synthetic oligonucleotide
  Target: SCNA; (+) strand; PAM type: YTN; PAM sequence: TTC
ctcatctctacaatcagaag

SEQ ID NO: 80048 - DNA, 20 bp, Artificial Sequence
  Description of Artificial Sequence: Synthetic oligonucleotide
  Target: SCNA; (+) strand; PAM type: YTN; PAM sequence: CTC
atctctacaatcagaagatt

SEQ ID NO: 80049 - DNA, 20 bp, Artificial Sequence
  Description of Artificial Sequence: Synthetic oligonucleotide
  Target: SCNA; (+) strand; PAM type: YTN; PAM sequence: CTC
tacaatcagaagattgatct

SEQ ID NO: 80050 - DNA, 20 bp, Artificial Sequence
  Description of Artificial Sequence: Synthetic oligonucleotide
  Target: SCNA; (+) strand; PAM type: YTN; PAM sequence: CTA
caatcagaagattgatctga

SEQ ID NO: 80051 - DNA, 20 bp, Artificial Sequence
  Description of Artificial Sequence: Synthetic oligonucleotide
  Target: SCNA; (+) strand; PAM type: YTN; PAM sequence: TTG
atctgaacagagggtctgtc

SEQ ID NO: 80052 - DNA, 20 bp, Artificial Sequence
  Description of Artificial Sequence: Synthetic oligonucleotide
  Target: SCNA; (+) strand; PAM type: YTN; PAM sequence: CTG
aacagagggtctgtcaatgg

SEQ ID NO: 80053 - DNA, 20 bp, Artificial Sequence
  Description of Artificial Sequence: Synthetic oligonucleotide
  Target: SCNA; (+) strand; PAM type: YTN; PAM sequence: CTG
tcaatggacttcccattaag

SEQ ID NO: 80054 - DNA, 20 bp, Artificial Sequence
  Description of Artificial Sequence: Synthetic oligonucleotide
  Target: SCNA; (+) strand; PAM type: YTN; PAM sequence: CTT
cccattaagctctttgatgt

SEQ ID NO: 80055 - DNA, 20 bp, Artificial Sequence
  Description of Artificial Sequence: Synthetic oligonucleotide
  Target: SCNA; (+) strand; PAM type: YTN; PAM sequence: TTC
ccattaagctctttgatgtg

SEQ ID NO: 80056 - DNA, 20 bp, Artificial Sequence
  Description of Artificial Sequence: Synthetic oligonucleotide
  Target: SCNA; (+) strand; PAM type: YTN; PAM sequence: TTA
agctctttgatgtgcgtatg

SEQ ID NO: 80057 - DNA, 20 bp, Artificial Sequence
  Description of Artificial Sequence: Synthetic oligonucleotide
  Target: SCNA; (+) strand; PAM type: YTN; PAM sequence: CTC
tttgatgtgcgtatgtgagt

SEQ ID NO: 80058 - DNA, 20 bp, Artificial Sequence
  Description of Artificial Sequence: Synthetic oligonucleotide
  Target: SCNA; (+) strand; PAM type: YTN; PAM sequence: CTT
tgatgtgcgtatgtgagtgc

SEQ ID NO: 80059 - DNA, 20 bp, Artificial Sequence
  Description of Artificial Sequence: Synthetic oligonucleotide
  Target: SCNA; (+) strand; PAM type: YTN; PAM sequence: TTT
gatgtgcgtatgtgagtgcg

SEQ ID NO: 80060 - DNA, 20 bp, Artificial Sequence
  Description of Artificial Sequence: Synthetic oligonucleotide
  Target: SCNA; (+) strand; PAM type: YTN; PAM sequence: TTG
atgtgcgtatgtgagtgcgc

SEQ ID NO: 80061 - DNA, 20 bp, Artificial Sequence
  Description of Artificial Sequence: Synthetic oligonucleotide
  Target: SCNA; (+) strand; PAM type: YTN; PAM sequence: TTT
ttctgaagctaagagggtct

SEQ ID NO: 80062 - DNA, 20 bp, Artificial Sequence
  Description of Artificial Sequence: Synthetic oligonucleotide
  Target: SCNA; (+) strand; PAM type: YTN; PAM sequence: TTT
tctgaagctaagagggtcta

SEQ ID NO: 80063 - DNA, 20 bp, Artificial Sequence
  Description of Artificial Sequence: Synthetic oligonucleotide
  Target: SCNA; (+) strand; PAM type: YTN; PAM sequence: TTT
ctgaagctaagagggtctat

SEQ ID NO: 80064 - DNA, 20 bp, Artificial Sequence
  Description of Artificial Sequence: Synthetic oligonucleotide
  Target: SCNA; (+) strand; PAM type: YTN; PAM sequence: TTC
tgaagctaagagggtctata

SEQ ID NO: 80065 - DNA, 20 bp, Artificial Sequence
  Description of Artificial Sequence: Synthetic oligonucleotide
  Target: SCNA; (+) strand; PAM type: YTN; PAM sequence: CTG
aagctaagagggtctatagc

SEQ ID NO: 80066 - DNA, 20 bp, Artificial Sequence
  Description of Artificial Sequence: Synthetic oligonucleotide
  Target: SCNA; (+) strand; PAM type: YTN; PAM sequence: CTA
agagggtctatagcttctat

SEQ ID NO: 80067 - DNA, 20 bp, Artificial Sequence
  Description of Artificial Sequence: Synthetic oligonucleotide
  Target: SCNA; (+) strand; PAM type: YTN; PAM sequence: CTA
tagcttctattagcccgtga

SEQ ID NO: 80068 - DNA, 20 bp, Artificial Sequence
  Description of Artificial Sequence: Synthetic oligonucleotide
  Target: SCNA; (+) strand; PAM type: YTN; PAM sequence: CTT
ctattagcccgtgaaaaggg

SEQ ID NO: 80069 - DNA, 20 bp, Artificial Sequence
  Description of Artificial Sequence: Synthetic oligonucleotide
  Target: SCNA; (+) strand; PAM type: YTN; PAM sequence: TTC
tattagcccgtgaaaagggt

SEQ ID NO: 80070 - DNA, 20 bp, Artificial Sequence
  Description of Artificial Sequence: Synthetic oligonucleotide
  Target: SCNA; (+) strand; PAM type: YTN; PAM sequence: CTA
ttagcccgtgaaaagggtcg

SEQ ID NO: 80071 - DNA, 20 bp, Artificial Sequence
  Description of Artificial Sequence: Synthetic oligonucleotide
  Target: SCNA; (+) strand; PAM type: YTN; PAM sequence: TTA
gcccgtgaaaagggtcggag

SEQ ID NO: 80072 - DNA, 20 bp, Artificial Sequence
  Description of Artificial Sequence: Synthetic oligonucleotide
  Target: SCNA; (+) strand; PAM type: YTN; PAM sequence: CTG
attaattgcctgtgtactaa

SEQ ID NO: 80073 - DNA, 20 bp, Artificial Sequence
  Description of Artificial Sequence: Synthetic oligonucleotide
  Target: SCNA; (+) strand; PAM type: YTN; PAM sequence: TTA
attgcctgtgtactaattta

SEQ ID NO: 80074 - DNA, 20 bp, Artificial Sequence
  Description of Artificial Sequence: Synthetic oligonucleotide
  Target: SCNA; (+) strand; PAM type: YTN; PAM sequence: TTG
cctgtgtactaatttaatct

SEQ ID NO: 80075 - DNA, 20 bp, Artificial Sequence
  Description of Artificial Sequence: Synthetic oligonucleotide
  Target: SCNA; (+) strand; PAM type: YTN; PAM sequence: CTG
tgtactaatttaatctgagg

SEQ ID NO: 80076 - DNA, 20 bp, Artificial Sequence
  Description of Artificial Sequence: Synthetic oligonucleotide
  Target: SCNA; (+) strand; PAM type: YTN; PAM sequence: CTA
atttaatctgaggtccctct

SEQ ID NO: 80077 - DNA, 20 bp, Artificial Sequence
  Description of Artificial Sequence: Synthetic oligonucleotide
  Target: SCNA; (+) strand; PAM type: YTN; PAM sequence: TTT
aatctgaggtccctcttaac

SEQ ID NO: 80078 - DNA, 20 bp, Artificial Sequence
  Description of Artificial Sequence: Synthetic oligonucleotide
  Target: SCNA; (+) strand; PAM type: YTN; PAM sequence: TTA
atctgaggtccctcttaact

SEQ ID NO: 80079 - DNA, 20 bp, Artificial Sequence
  Description of Artificial Sequence: Synthetic oligonucleotide
  Target: SCNA; (+) strand; PAM type: YTN; PAM sequence: CTG
aggtccctcttaacttgtga

SEQ ID NO: 80080 - DNA, 20 bp, Artificial Sequence
  Description of Artificial Sequence: Synthetic oligonucleotide
  Target: SCNA; (+) strand; PAM type: YTN; PAM sequence: CTC
ttaacttgtgaaatcttacg

SEQ ID NO: 80081 - DNA, 20 bp, Artificial Sequence
  Description of Artificial Sequence: Synthetic oligonucleotide
  Target: SCNA; (+) strand; PAM type: YTN; PAM sequence: CTT
aacttgtgaaatcttacgaa

SEQ ID NO: 80082 - DNA, 20 bp, Artificial Sequence
  Description of Artificial Sequence: Synthetic oligonucleotide
  Target: SCNA; (+) strand; PAM type: YTN; PAM sequence: TTA
acttgtgaaatcttacgaag

SEQ ID NO: 80083 - DNA, 20 bp, Artificial Sequence
  Description of Artificial Sequence: Synthetic oligonucleotide
  Target: SCNA; (+) strand; PAM type: YTN; PAM sequence: CTT
gtgaaatcttacgaagctat

SEQ ID NO: 80084 - DNA, 20 bp, Artificial Sequence
  Description of Artificial Sequence: Synthetic oligonucleotide
  Target: SCNA; (+) strand; PAM type: YTN; PAM sequence: TTG
tgaaatcttacgaagctata

SEQ ID NO: 80085 - DNA, 20 bp, Artificial Sequence
  Description of Artificial Sequence: Synthetic oligonucleotide
  Target: SCNA; (+) strand; PAM type: YTN; PAM sequence: CTT
acgaagctataaatagaatt

SEQ ID NO: 80086 - DNA, 20 bp, Artificial Sequence
  Description of Artificial Sequence: Synthetic oligonucleotide
  Target: SCNA; (+) strand; PAM type: YTN; PAM sequence: TTA
cgaagctataaatagaatta

SEQ ID NO: 80087 - DNA, 20 bp, Artificial Sequence
  Description of Artificial Sequence: Synthetic oligonucleotide
  Target: SCNA; (+) strand; PAM type: YTN; PAM sequence: CTA
taaatagaattaaaatttta

SEQ ID NO: 80088 - DNA, 20 bp, Artificial Sequence
  Description of Artificial Sequence: Synthetic oligonucleotide
  Target: SCNA; (+) strand; PAM type: YTN; PAM sequence: TTA
aaattttagatggaaaccag

SEQ ID NO: 80089 - DNA, 20 bp, Artificial Sequence
  Description of Artificial Sequence: Synthetic oligonucleotide
  Target: SCNA; (+) strand; PAM type: YTN; PAM sequence: TTT
tagatggaaaccaggaatta

SEQ ID NO: 80090 - DNA, 20 bp, Artificial Sequence
  Description of Artificial Sequence: Synthetic oligonucleotide
  Target: SCNA; (+) strand; PAM type: YTN; PAM sequence: TTT
agatggaaaccaggaattaa

SEQ ID NO: 80091 - DNA, 20 bp, Artificial Sequence
  Description of Artificial Sequence: Synthetic oligonucleotide
  Target: SCNA; (+) strand; PAM type: YTN; PAM sequence: TTA
gatggaaaccaggaattaat

SEQ ID NO: 80092 - DNA, 20 bp, Artificial Sequence
  Description of Artificial Sequence: Synthetic oligonucleotide
  Target: SCNA; (+) strand; PAM type: YTN; PAM sequence: TTA
atataattattatccctaat

SEQ ID NO: 80093 - DNA, 20 bp, Artificial Sequence
  Description of Artificial Sequence: Synthetic oligonucleotide
  Target: SCNA; (+) strand; PAM type: YTN; PAM sequence: TTA
ttatccctaataagattatt

SEQ ID NO: 80094 - DNA, 20 bp, Artificial Sequence
  Description of Artificial Sequence: Synthetic oligonucleotide
  Target: SCNA; (+) strand; PAM type: YTN; PAM sequence: TTA
tccctaataagattatttga

SEQ ID NO: 80095 - DNA, 20 bp, Artificial Sequence
  Description of Artificial Sequence: Synthetic oligonucleotide
  Target: SCNA; (+) strand; PAM type: YTN; PAM sequence: CTA
ataagattatttgaaaagca

SEQ ID NO: 80096 - DNA, 20 bp, Artificial Sequence
  Description of Artificial Sequence: Synthetic oligonucleotide
  Target: SCNA; (+) strand; PAM type: YTN; PAM sequence: TTA
tttgaaaagcatattttgta

SEQ ID NO: 80097 - DNA, 20 bp, Artificial Sequence
  Description of Artificial Sequence: Synthetic oligonucleotide
  Target: SCNA; (+) strand; PAM type: YTN; PAM sequence: TTT
gaaaagcatattttgtacaa

SEQ ID NO: 80098 - DNA, 20 bp, Artificial Sequence
  Description of Artificial Sequence: Synthetic oligonucleotide
  Target: SCNA; (+) strand; PAM type: YTN; PAM sequence: TTG
aaaagcatattttgtacaaa

SEQ ID NO: 80099 - DNA, 20 bp, Artificial Sequence
  Description of Artificial Sequence: Synthetic oligonucleotide
  Target: SCNA; (+) strand; PAM type: YTN; PAM sequence: TTT
tgtacaaaggggtaccacca

SEQ ID NO: 80100 - DNA, 20 bp, Artificial Sequence
  Description of Artificial Sequence: Synthetic oligonucleotide
  Target: SCNA; (+) strand; PAM type: YTN; PAM sequence: TTT
gtacaaaggggtaccaccat

SEQ ID NO: 80101 - DNA, 20 bp, Artificial Sequence
  Description of Artificial Sequence: Synthetic oligonucleotide
  Target: SCNA; (+) strand; PAM type: YTN; PAM sequence: TTG
tacaaaggggtaccaccatg

SEQ ID NO: 80102 - DNA, 20 bp, Artificial Sequence
  Description of Artificial Sequence: Synthetic oligonucleotide
  Target: SCNA; (+) strand; PAM type: YTN; PAM sequence: TTC
aaacattagctgaagaactt

SEQ ID NO: 80103 - DNA, 20 bp, Artificial Sequence
  Description of Artificial Sequence: Synthetic oligonucleotide
  Target: SCNA; (+) strand; PAM type: YTN; PAM sequence: TTA
gctgaagaacttcactagaa

SEQ ID NO: 80104 - DNA, 20 bp, Artificial Sequence
  Description of Artificial Sequence: Synthetic oligonucleotide
  Target: SCNA; (+) strand; PAM type: YTN; PAM sequence: CTG
aagaacttcactagaagccc

SEQ ID NO: 80105 - DNA, 20 bp, Artificial Sequence
  Description of Artificial Sequence: Synthetic oligonucleotide
  Target: SCNA; (+) strand; PAM type: YTN; PAM sequence: CTT
cactagaagcccagtaagga

SEQ ID NO: 80106 - DNA, 20 bp, Artificial Sequence
  Description of Artificial Sequence: Synthetic oligonucleotide
  Target: SCNA; (+) strand; PAM type: YTN; PAM sequence: TTC
actagaagcccagtaaggat

SEQ ID NO: 80107 - DNA, 20 bp, Artificial Sequence
  Description of Artificial Sequence: Synthetic oligonucleotide
  Target: SCNA; (+) strand; PAM type: YTN; PAM sequence: CTA
gaagcccagtaaggatttgc

SEQ ID NO: 80108 - DNA, 20 bp, Artificial Sequence
  Description of Artificial Sequence: Synthetic oligonucleotide
  Target: SCNA; (+) strand; PAM type: YTN; PAM sequence: TTT
gccatcattagcatccattg

SEQ ID NO: 80109 - DNA, 20 bp, Artificial Sequence
  Description of Artificial Sequence: Synthetic oligonucleotide
  Target: SCNA; (+) strand; PAM type: YTN; PAM sequence: TTG
ccatcattagcatccattgc

SEQ ID NO: 80110 - DNA, 20 bp, Artificial Sequence
  Description of Artificial Sequence: Synthetic oligonucleotide
  Target: SCNA; (+) strand; PAM type: YTN; PAM sequence: TTA
gcatccattgcaccagacac

SEQ ID NO: 80111 - DNA, 20 bp, Artificial Sequence
  Description of Artificial Sequence: Synthetic oligonucleotide
  Target: SCNA; (+) strand; PAM type: YTN; PAM sequence: TTG
caccagacactagacatgta

SEQ ID NO: 80112 - DNA, 20 bp, Artificial Sequence
  Description of Artificial Sequence: Synthetic oligonucleotide
  Target: SCNA; (+) strand; PAM type: YTN; PAM sequence: CTA
gacatgtaagtacatgtagt

SEQ ID NO: 80113 - DNA, 20 bp, Artificial Sequence
  Description of Artificial Sequence: Synthetic oligonucleotide
  Target: SCNA; (+) strand; PAM type: YTN; PAM sequence: CTA
aatatatcacagatattttt

SEQ ID NO: 80114 - DNA, 20 bp, Artificial Sequence
  Description of Artificial Sequence: Synthetic oligonucleotide
  Target: SCNA; (+) strand; PAM type: YTN; PAM sequence: TTT
ttgttctgcctttttattat

SEQ ID NO: 80115 - DNA, 20 bp, Artificial Sequence
  Description of Artificial Sequence: Synthetic oligonucleotide
  Target: SCNA; (+) strand; PAM type: YTN; PAM sequence: TTT
tgttctgcctttttattatc

SEQ ID NO: 80116 - DNA, 20 bp, Artificial Sequence
  Description of Artificial Sequence: Synthetic oligonucleotide
  Target: SCNA; (+) strand; PAM type: YTN; PAM sequence: TTT
gttctgcctttttattatca

SEQ ID NO: 80117 - DNA, 20 bp, Artificial Sequence
  Description of Artificial Sequence: Synthetic oligonucleotide
  Target: SCNA; (+) strand; PAM type: YTN; PAM sequence: TTG
ttctgcctttttattatcag

SEQ ID NO: 80118 - DNA, 20 bp, Artificial Sequence
  Description of Artificial Sequence: Synthetic oligonucleotide
  Target: SCNA; (+) strand; PAM type: YTN; PAM sequence: TTC
tgcctttttattatcagagt

SEQ ID NO: 80119 - DNA, 20 bp, Artificial Sequence
  Description of Artificial Sequence: Synthetic oligonucleotide
  Target: SCNA; (+) strand; PAM type: YTN; PAM sequence: CTG
cctttttattatcagagttt

SEQ ID NO: 80120 - DNA, 20 bp, Artificial Sequence
  Description of Artificial Sequence: Synthetic oligonucleotide
  Target: SCNA; (+) strand; PAM type: YTN; PAM sequence: CTT
tttattatcagagttttaat

SEQ ID NO: 80121 - DNA, 20 bp, Artificial Sequence
  Description of Artificial Sequence: Synthetic oligonucleotide
  Target: SCNA; (+) strand; PAM type: YTN; PAM sequence: TTT
ttattatcagagttttaatg

SEQ ID NO: 80122 - DNA, 20 bp, Artificial Sequence
  Description of Artificial Sequence: Synthetic oligonucleotide
  Target: SCNA; (+) strand; PAM type: YTN; PAM sequence: TTT
tattatcagagttttaatgg

SEQ ID NO: 80123 - DNA, 20 bp, Artificial Sequence
  Description of Artificial Sequence: Synthetic oligonucleotide
  Target: SCNA; (+) strand; PAM type: YTN; PAM sequence: TTT
attatcagagttttaatggg

SEQ ID NO: 80124 - DNA, 20 bp, Artificial Sequence
  Description of Artificial Sequence: Synthetic oligonucleotide
  Target: SCNA; (+) strand; PAM type: YTN; PAM sequence: TTA
ttatcagagttttaatgggc

SEQ ID NO: 80125 - DNA, 20 bp, Artificial Sequence
  Description of Artificial Sequence: Synthetic oligonucleotide
  Target: SCNA; (+) strand; PAM type: YTN; PAM sequence: TTA
tcagagttttaatgggctat

SEQ ID NO: 80126 - DNA, 20 bp, Artificial Sequence
  Description of Artificial Sequence: Synthetic oligonucleotide
  Target: SCNA; (+) strand; PAM type: YTN; PAM sequence: TTT
taatgggctatcaaggtaag

SEQ ID NO: 80127 - DNA, 20 bp, Artificial Sequence
  Description of Artificial Sequence: Synthetic oligonucleotide
  Target: SCNA; (+) strand; PAM type: YTN; PAM sequence: TTT
aatgggctatcaaggtaagg

SEQ ID NO: 80128 - DNA, 20 bp, Artificial Sequence
  Description of Artificial Sequence: Synthetic oligonucleotide
  Target: SCNA; (+) strand; PAM type: YTN; PAM sequence: TTA
atgggctatcaaggtaaggc

SEQ ID NO: 80129 - DNA, 20 bp, Artificial Sequence
  Description of Artificial Sequence: Synthetic oligonucleotide
  Target: SCNA; (+) strand; PAM type: YTN; PAM sequence: CTA
tcaaggtaaggctgctactt

SEQ ID NO: 80130 - DNA, 20 bp, Artificial Sequence
  Description of Artificial Sequence: Synthetic oligonucleotide
  Target: SCNA; (+) strand; PAM type: YTN; PAM sequence: CTG
ctacttaggattacatgaag

SEQ ID NO: 80131 - DNA, 20 bp, Artificial Sequence
  Description of Artificial Sequence: Synthetic oligonucleotide
  Target: SCNA; (+) strand; PAM type: YTN; PAM sequence: CTA
cttaggattacatgaagtgg

SEQ ID NO: 80132 - DNA, 20 bp, Artificial Sequence
  Description of Artificial Sequence: Synthetic oligonucleotide
  Target: SCNA; (+) strand; PAM type: YTN; PAM sequence: CTT
aggattacatgaagtggaaa

SEQ ID NO: 80133 - DNA, 20 bp, Artificial Sequence
  Description of Artificial Sequence: Synthetic oligonucleotide
  Target: SCNA; (+) strand; PAM type: YTN; PAM sequence: TTA
ggattacatgaagtggaaac

SEQ ID NO: 80134 - DNA, 20 bp, Artificial Sequence
  Description of Artificial Sequence: Synthetic oligonucleotide
  Target: SCNA; (+) strand; PAM type: YTN; PAM sequence: TTA
catgaagtggaaacaaccca

SEQ ID NO: 80135 - DNA, 20 bp, Artificial Sequence
  Description of Artificial Sequence: Synthetic oligonucleotide
  Target: SCNA; (+) strand; PAM type: YTN; PAM sequence: TTT
gccagcaaataaaacttctt

SEQ ID NO: 80136 - DNA, 20 bp, Artificial Sequence
  Description of Artificial Sequence: Synthetic oligonucleotide
  Target: SCNA; (+) strand; PAM type: YTN; PAM sequence: TTG
ccagcaaataaaacttcttt

SEQ ID NO: 80137 - DNA, 20 bp, Artificial Sequence
  Description of Artificial Sequence: Synthetic oligonucleotide
  Target: SCNA; (+) strand; PAM type: YTN; PAM sequence: CTT
ctttctcacaattttcaaga

SEQ ID NO: 80138 - DNA, 20 bp, Artificial Sequence
  Description of Artificial Sequence: Synthetic oligonucleotide
  Target: SCNA; (+) strand; PAM type: YTN; PAM sequence: TTC
tttctcacaattttcaagat

SEQ ID NO: 80139 - DNA, 20 bp, Artificial Sequence
  Description of Artificial Sequence: Synthetic oligonucleotide
  Target: SCNA; (+) strand; PAM type: YTN; PAM sequence: CTT
tctcacaattttcaagatat

SEQ ID NO: 80140 - DNA, 20 bp, Artificial Sequence
  Description of Artificial Sequence: Synthetic oligonucleotide
  Target: SCNA; (+) strand; PAM type: YTN; PAM sequence: TTT
ctcacaattttcaagatatt

SEQ ID NO: 80141 - DNA, 20 bp, Artificial Sequence
  Description of Artificial Sequence: Synthetic oligonucleotide
  Target: SCNA; (+) strand; PAM type: YTN; PAM sequence: TTC
tcacaattttcaagatattc

SEQ ID NO: 80142 - DNA, 20 bp, Artificial Sequence
  Description of Artificial Sequence: Synthetic oligonucleotide
  Target: SCNA; (+) strand; PAM type: YTN; PAM sequence: CTC
acaattttcaagatattcat

SEQ ID NO: 80143 - DNA, 20 bp, Artificial Sequence
  Description of Artificial Sequence: Synthetic oligonucleotide
  Target: SCNA; (+) strand; PAM type: YTN; PAM sequence: TTT
tcaagatattcatccaaaat

SEQ ID NO: 80144 - DNA, 20 bp, Artificial Sequence
  Description of Artificial Sequence: Synthetic oligonucleotide
  Target: SCNA; (+) strand; PAM type: YTN; PAM sequence: TTT
caagatattcatccaaaatc

SEQ ID NO: 80145 - DNA, 20 bp, Artificial Sequence
  Description of Artificial Sequence: Synthetic oligonucleotide
  Target: SCNA; (+) strand; PAM type: YTN; PAM sequence: TTC
aagatattcatccaaaatca

SEQ ID NO: 80146 - DNA, 20 bp, Artificial Sequence
  Description of Artificial Sequence: Synthetic oligonucleotide
  Target: SCNA; (+) strand; PAM type: YTN; PAM sequence: TTC
atccaaaatcattttgattg

SEQ ID NO: 80147 - DNA, 20 bp, Artificial Sequence
  Description of Artificial Sequence: Synthetic oligonucleotide
  Target: SCNA; (+) strand; PAM type: YTN; PAM sequence: TTT
tgattgtaacttttggatag

SEQ ID NO: 80148 - DNA, 20 bp, Artificial Sequence
  Description of Artificial Sequence: Synthetic oligonucleotide
  Target: SCNA; (+) strand; PAM type: YTN; PAM sequence: TTT
gattgtaacttttggatagc

SEQ ID NO: 80149 - DNA, 20 bp, Artificial Sequence
  Description of Artificial Sequence: Synthetic oligonucleotide
  Target: SCNA; (+) strand; PAM type: YTN; PAM sequence: TTG
attgtaacttttggatagct

SEQ ID NO: 80150 - DNA, 20 bp, Artificial Sequence
  Description of Artificial Sequence: Synthetic oligonucleotide
  Target: SCNA; (+) strand; PAM type: YTN; PAM sequence: TTG
taacttttggatagctgaat

SEQ ID NO: 80151 - DNA, 20 bp, Artificial Sequence
  Description of Artificial Sequence: Synthetic oligonucleotide
  Target: SCNA; (+) strand; PAM type: YTN; PAM sequence: CTT
ttggatagctgaatagcact

SEQ ID NO: 80152 - DNA, 20 bp, Artificial Sequence
  Description of Artificial Sequence: Synthetic oligonucleotide
  Target: SCNA; (+) strand; PAM type: YTN; PAM sequence: TTT
tggatagctgaatagcactg

SEQ ID NO: 80153 - DNA, 20 bp, Artificial Sequence
  Description of Artificial Sequence: Synthetic oligonucleotide
  Target: SCNA; (+) strand; PAM type: YTN; PAM sequence: TTT
ggatagctgaatagcactgt

SEQ ID NO: 80154 - DNA, 20 bp, Artificial Sequence
  Description of Artificial Sequence: Synthetic oligonucleotide
  Target: SCNA; (+) strand; PAM type: YTN; PAM sequence: TTG
gatagctgaatagcactgtt

SEQ ID NO: 80155 - DNA, 20 bp, Artificial Sequence
  Description of Artificial Sequence: Synthetic oligonucleotide
  Target: SCNA; (+) strand; PAM type: YTN; PAM sequence: CTG
aatagcactgttcttatact

SEQ ID NO: 80156 - DNA, 20 bp, Artificial Sequence
  Description of Artificial Sequence: Synthetic oligonucleotide
  Target: SCNA; (+) strand; PAM type: YTN; PAM sequence: CTG
ttcttatactaagcatatga

SEQ ID NO: 80157 - DNA, 20 bp, Artificial Sequence
  Description of Artificial Sequence: Synthetic oligonucleotide
  Target: SCNA; (+) strand; PAM type: YTN; PAM sequence: TTC
ttatactaagcatatgatta

SEQ ID NO: 80158 - DNA, 20 bp, Artificial Sequence
  Description of Artificial Sequence: Synthetic oligonucleotide
  Target: SCNA; (+) strand; PAM type: YTN; PAM sequence: CTT
atactaagcatatgattata

SEQ ID NO: 80159 - DNA, 20 bp, Artificial Sequence
  Description of Artificial Sequence: Synthetic oligonucleotide
  Target: SCNA; (+) strand; PAM type: YTN; PAM sequence: TTA
tactaagcatatgattataa

SEQ ID NO: 80160 - DNA, 20 bp, Artificial Sequence
  Description of Artificial Sequence: Synthetic oligonucleotide
  Target: SCNA; (+) strand; PAM type: YTN; PAM sequence: CTA
agcatatgattataaaagac

SEQ ID NO: 80161 - DNA, 20 bp, Artificial Sequence
  Description of Artificial Sequence: Synthetic oligonucleotide
  Target: SCNA; (+) strand; PAM type: YTN; PAM sequence: TTA
taaaagacccagaaatgaaa

SEQ ID NO: 80162 - DNA, 20 bp, Artificial Sequence
  Description of Artificial Sequence: Synthetic oligonucleotide
  Target: SCNA; (+) strand; PAM type: YTN; PAM sequence: TTG
ttgtgcttactcacttcctt

SEQ ID NO: 80163 - DNA, 20 bp, Artificial Sequence
  Description of Artificial Sequence: Synthetic oligonucleotide
  Target: SCNA; (+) strand; PAM type: YTN; PAM sequence: TTG
tgcttactcacttccttccc

SEQ ID NO: 80164 - DNA, 20 bp, Artificial Sequence
  Description of Artificial Sequence: Synthetic oligonucleotide
  Target: SCNA; (+) strand; PAM type: YTN; PAM sequence: CTT
actcacttccttccctcctt

SEQ ID NO: 80165 - DNA, 20 bp, Artificial Sequence
  Description of Artificial Sequence: Synthetic oligonucleotide
  Target: SCNA; (+) strand; PAM type: YTN; PAM sequence: TTA
ctcacttccttccctcctta

SEQ ID NO: 80166 - DNA, 20 bp, Artificial Sequence
  Description of Artificial Sequence: Synthetic oligonucleotide
  Target: SCNA; (+) strand; PAM type: YTN; PAM sequence: CTC
acttccttccctccttaatt

SEQ ID NO: 80167 - DNA, 20 bp, Artificial Sequence
  Description of Artificial Sequence: Synthetic oligonucleotide
  Target: SCNA; (+) strand; PAM type: YTN; PAM sequence: CTT
ccttccctccttaatttaat

SEQ ID NO: 80168 - DNA, 20 bp, Artificial Sequence
  Description of Artificial Sequence: Synthetic oligonucleotide
  Target: SCNA; (+) strand; PAM type: YTN; PAM sequence: TTC
cttccctccttaatttaata

SEQ ID NO: 80169 - DNA, 20 bp, Artificial Sequence
  Description of Artificial Sequence: Synthetic oligonucleotide
  Target: SCNA; (+) strand; PAM type: YTN; PAM sequence: CTT
ccctccttaatttaataaat

SEQ ID NO: 80170 - DNA, 20 bp, Artificial Sequence
  Description of Artificial Sequence: Synthetic oligonucleotide
  Target: SCNA; (+) strand; PAM type: YTN; PAM sequence: TTC
cctccttaatttaataaatg

SEQ ID NO: 80171 - DNA, 20 bp, Artificial Sequence
  Description of Artificial Sequence: Synthetic oligonucleotide
  Target: SCNA; (+) strand; PAM type: YTN; PAM sequence: CTC
cttaatttaataaatgtttg

SEQ ID NO: 80172 - DNA, 20 bp, Artificial Sequence
  Description of Artificial Sequence: Synthetic oligonucleotide
  Target: SCNA; (+) strand; PAM type: YTN; PAM sequence: CTT
aatttaataaatgtttgtta

SEQ ID NO: 80173 - DNA, 20 bp, Artificial Sequence
  Description of Artificial Sequence: Synthetic oligonucleotide
  Target: SCNA; (+) strand; PAM type: YTN; PAM sequence: TTA
atttaataaatgtttgttaa

SEQ ID NO: 80174 - DNA, 20 bp, Artificial Sequence
  Description of Artificial Sequence: Synthetic oligonucleotide
  Target: SCNA; (+) strand; PAM type: YTN; PAM sequence: TTT
aataaatgtttgttaattgt

SEQ ID NO: 80175 - DNA, 20 bp, Artificial Sequence
  Description of Artificial Sequence: Synthetic oligonucleotide
  Target: SCNA; (+) strand; PAM type: YTN; PAM sequence: TTA
ataaatgtttgttaattgtc

SEQ ID NO: 80176 - DNA, 20 bp, Artificial Sequence
  Description of Artificial Sequence: Synthetic oligonucleotide
  Target: SCNA; (+) strand; PAM type: YTN; PAM sequence: TTT
gttaattgtctactgtaagt

SEQ ID NO: 80177 - DNA, 20 bp, Artificial Sequence
  Description of Artificial Sequence: Synthetic oligonucleotide
  Target: SCNA; (+) strand; PAM type: YTN; PAM sequence: TTG
ttaattgtctactgtaagtt

SEQ ID NO: 80178 - DNA, 20 bp, Artificial Sequence
  Description of Artificial Sequence: Synthetic oligonucleotide
  Target: SCNA; (+) strand; PAM type: YTN; PAM sequence: TTA
attgtctactgtaagttgga

SEQ ID NO: 80179 - DNA, 20 bp, Artificial Sequence
  Description of Artificial Sequence: Synthetic oligonucleotide
  Target: SCNA; (+) strand; PAM type: YTN; PAM sequence: TTG
tctactgtaagttggaaact

SEQ ID NO: 80180 - DNA, 20 bp, Artificial Sequence
  Description of Artificial Sequence: Synthetic oligonucleotide
  Target: SCNA; (+) strand; PAM type: YTN; PAM sequence: CTA
ctgtaagttggaaactctcc

SEQ ID NO: 80181 - DNA, 20 bp, Artificial Sequence
  Description of Artificial Sequence: Synthetic oligonucleotide
  Target: SCNA; (+) strand; PAM type: YTN; PAM sequence: CTG
taagttggaaactctcccag

SEQ ID NO: 80182 - DNA, 20 bp, Artificial Sequence
  Description of Artificial Sequence: Synthetic oligonucleotide
  Target: SCNA; (+) strand; PAM type: YTN; PAM sequence: TTG
gaaactctcccagacacttg

SEQ ID NO: 80183 - DNA, 20 bp, Artificial Sequence
  Description of Artificial Sequence: Synthetic oligonucleotide
  Target: SCNA; (+) strand; PAM type: YTN; PAM sequence: CTC
tcccagacacttgtgaaata

SEQ ID NO: 80184 - DNA, 20 bp, Artificial Sequence
  Description of Artificial Sequence: Synthetic oligonucleotide
  Target: SCNA; (+) strand; PAM type: YTN; PAM sequence: CTC
ccagacacttgtgaaatatc

SEQ ID NO: 80185 - DNA, 20 bp, Artificial Sequence
  Description of Artificial Sequence: Synthetic oligonucleotide
  Target: SCNA; (+) strand; PAM type: YTN; PAM sequence: CTT
gtgaaatatcaatgaacaaa

SEQ ID NO: 80186 - DNA, 20 bp, Artificial Sequence
  Description of Artificial Sequence: Synthetic oligonucleotide
  Target: SCNA; (+) strand; PAM type: YTN; PAM sequence: TTG
tgaaatatcaatgaacaaaa

SEQ ID NO: 80187 - DNA, 20 bp, Artificial Sequence
  Description of Artificial Sequence: Synthetic oligonucleotide
  Target: SCNA; (+) strand; PAM type: YTN; PAM sequence: TTT
cactctcatggtgcctacat

SEQ ID NO: 80188 - DNA, 20 bp, Artificial Sequence
  Description of Artificial Sequence: Synthetic oligonucleotide
  Target: SCNA; (+) strand; PAM type: YTN; PAM sequence: TTC
actctcatggtgcctacatt

SEQ ID NO: 80189 - DNA, 20 bp, Artificial Sequence
  Description of Artificial Sequence: Synthetic oligonucleotide
  Target: SCNA; (+) strand; PAM type: YTN; PAM sequence: CTC
tcatggtgcctacattctag

SEQ ID NO: 80190 - DNA, 20 bp, Artificial Sequence
  Description of Artificial Sequence: Synthetic oligonucleotide
  Target: SCNA; (+) strand; PAM type: YTN; PAM sequence: CTC
atggtgcctacattctagaa

SEQ ID NO: 80191 - DNA, 20 bp, Artificial Sequence
  Description of Artificial Sequence: Synthetic oligonucleotide
  Target: SCNA; (+) strand; PAM type: YTN; PAM sequence: CTA
cattctagaagggagaaata

SEQ ID NO: 80192 - DNA, 20 bp, Artificial Sequence
  Description of Artificial Sequence: Synthetic oligonucleotide
  Target: SCNA; (+) strand; PAM type: YTN; PAM sequence: TTC
tagaagggagaaataaaata

SEQ ID NO: 80193 - DNA, 20 bp, Artificial Sequence
  Description of Artificial Sequence: Synthetic oligonucleotide
  Target: SCNA; (+) strand; PAM type: YTN; PAM sequence: CTA
gaagggagaaataaaataaa

SEQ ID NO: 80194 - DNA, 20 bp, Artificial Sequence
  Description of Artificial Sequence: Synthetic oligonucleotide
  Target: SCNA; (+) strand; PAM type: YTN; PAM sequence: TTA
aagtaagcacattatgtatt

SEQ ID NO: 80195 - DNA, 20 bp, Artificial Sequence
  Description of Artificial Sequence: Synthetic oligonucleotide
  Target: SCNA; (+) strand; PAM type: YTN; PAM sequence: TTA
tgtattatatttaaaggtga

SEQ ID NO: 80196 - DNA, 20 bp, Artificial Sequence
  Description of Artificial Sequence: Synthetic oligonucleotide
  Target: SCNA; (+) strand; PAM type: YTN; PAM sequence: TTA
tatttaaaggtgaataacac

SEQ ID NO: 80197 - DNA, 20 bp, Artificial Sequence
  Description of Artificial Sequence: Synthetic oligonucleotide
  Target: SCNA; (+) strand; PAM type: YTN; PAM sequence: TTT
aaaggtgaataacactttgg

SEQ ID NO: 80198 - DNA, 20 bp, Artificial Sequence
  Description of Artificial Sequence: Synthetic oligonucleotide
  Target: SCNA; (+) strand; PAM type: YTN; PAM sequence: TTA
aaggtgaataacactttggc

SEQ ID NO: 80199 - DNA, 20 bp, Artificial Sequence
  Description of Artificial Sequence: Synthetic oligonucleotide
  Target: SCNA; (+) strand; PAM type: YTN; PAM sequence: CTT
tggcaaagaaaggaaaaaga

SEQ ID NO: 80200 - DNA, 20 bp, Artificial Sequence
  Description of Artificial Sequence: Synthetic oligonucleotide
  Target: SCNA; (+) strand; PAM type: YTN; PAM sequence: TTT
ggcaaagaaaggaaaaagaa

SEQ ID NO: 80201 - DNA, 20 bp, Artificial Sequence
  Description of Artificial Sequence: Synthetic oligonucleotide
  Target: SCNA; (+) strand; PAM type: YTN; PAM sequence: TTG
gcaaagaaaggaaaaagaaa

SEQ ID NO: 80202 - DNA, 20 bp, Artificial Sequence
  Description of Artificial Sequence: Synthetic oligonucleotide
  Target: SCNA; (+) strand; PAM type: YTN; PAM sequence: CTG
ggaataccagaggtgagaag

SEQ ID NO: 80203 - DNA, 20 bp, Artificial Sequence
  Description of Artificial Sequence: Synthetic oligonucleotide
  Target: SCNA; (+) strand; PAM type: YTN; PAM sequence: CTC
caattttatatagattaggg

SEQ ID NO: 80204 - DNA, 20 bp, Artificial Sequence
  Description of Artificial Sequence: Synthetic oligonucleotide
  Target: SCNA; (+) strand; PAM type: YTN; PAM sequence: TTT
tatatagattagggcaggcc

SEQ ID NO: 80205 - DNA, 20 bp, Artificial Sequence
  Description of Artificial Sequence: Synthetic oligonucleotide
  Target: SCNA; (+) strand; PAM type: YTN; PAM sequence: TTT
atatagattagggcaggcct

SEQ ID NO: 80206 - DNA, 20 bp, Artificial Sequence
  Description of Artificial Sequence: Synthetic oligonucleotide
  Target: SCNA; (+) strand; PAM type: YTN; PAM sequence: TTA
tatagattagggcaggcctc

SEQ ID NO: 80207 - DNA, 20 bp, Artificial Sequence
  Description of Artificial Sequence: Synthetic oligonucleotide
  Target: SCNA; (+) strand; PAM type: YTN; PAM sequence: TTA
gggcaggcctccccaagaac

SEQ ID NO: 80208 - DNA, 20 bp, Artificial Sequence
  Description of Artificial Sequence: Synthetic oligonucleotide
  Target: SCNA; (+) strand; PAM type: YTN; PAM sequence: CTC
cccaagaacgtgtcagggca

SEQ ID NO: 80209 - DNA, 20 bp, Artificial Sequence
  Description of Artificial Sequence: Synthetic oligonucleotide
  Target: SCNA; (+) strand; PAM type: YTN; PAM sequence: CTT
gatttattcaagaaatagca

SEQ ID NO: 80210 - DNA, 20 bp, Artificial Sequence
  Description of Artificial Sequence: Synthetic oligonucleotide
  Target: SCNA; (+) strand; PAM type: YTN; PAM sequence: TTG
atttattcaagaaatagcaa

SEQ ID NO: 80211 - DNA, 20 bp, Artificial Sequence
  Description of Artificial Sequence: Synthetic oligonucleotide
  Target: SCNA; (+) strand; PAM type: YTN; PAM sequence: TTT
attcaagaaatagcaaggag

SEQ ID NO: 80212 - DNA, 20 bp, Artificial Sequence
  Description of Artificial Sequence: Synthetic oligonucleotide
  Target: SCNA; (+) strand; PAM type: YTN; PAM sequence: TTA
ttcaagaaatagcaaggagg

SEQ ID NO: 80213 - DNA, 20 bp, Artificial Sequence
  Description of Artificial Sequence: Synthetic oligonucleotide
  Target: SCNA; (+) strand; PAM type: YTN; PAM sequence: TTC
aagaaatagcaaggaggtca

SEQ ID NO: 80214 - DNA, 20 bp, Artificial Sequence
  Description of Artificial Sequence: Synthetic oligonucleotide
  Target: SCNA; (+) strand; PAM type: YTN; PAM sequence: TTG
tggcagggaaaaagcaaaaa

SEQ ID NO: 80215 - DNA, 20 bp, Artificial Sequence
  Description of Artificial Sequence: Synthetic oligonucleotide
  Target: SCNA; (+) strand; PAM type: YTN; PAM sequence: TTA
ttttgctgttgtagtggtga

SEQ ID NO: 80216 - DNA, 20 bp, Artificial Sequence
  Description of Artificial Sequence: Synthetic oligonucleotide
  Target: SCNA; (+) strand; PAM type: YTN; PAM sequence: TTT
tgctgttgtagtggtgatgt

SEQ ID NO: 80217 - DNA, 20 bp, Artificial Sequence
  Description of Artificial Sequence: Synthetic oligonucleotide
  Target: SCNA; (+) strand; PAM type: YTN; PAM sequence: TTT
gctgttgtagtggtgatgtt

SEQ ID NO: 80218 - DNA, 20 bp, Artificial Sequence
  Description of Artificial Sequence: Synthetic oligonucleotide
  Target: SCNA; (+) strand; PAM type: YTN; PAM sequence: TTG
ctgttgtagtggtgatgttt

SEQ ID NO: 80219 - DNA, 20 bp, Artificial Sequence
  Description of Artificial Sequence: Synthetic oligonucleotide
  Target: SCNA; (+) strand; PAM type: YTN; PAM sequence: CTG
ttgtagtggtgatgtttgtg

SEQ ID NO: 80220 - DNA, 20 bp, Artificial Sequence
  Description of Artificial Sequence: Synthetic oligonucleotide
  Target: SCNA; (+) strand; PAM type: YTN; PAM sequence: TTG
tagtggtgatgtttgtgaaa

SEQ ID NO: 80221 - DNA, 20 bp, Artificial Sequence
  Description of Artificial Sequence: Synthetic oligonucleotide
  Target: SCNA; (+) strand; PAM type: YTN; PAM sequence: TTT
gtgaaacttcaacgttgttg

SEQ ID NO: 80222 - DNA, 20 bp, Artificial Sequence
  Description of Artificial Sequence: Synthetic oligonucleotide
  Target: SCNA; (+) strand; PAM type: YTN; PAM sequence: TTG
tgaaacttcaacgttgttga

SEQ ID NO: 80223 - DNA, 20 bp, Artificial Sequence
  Description of Artificial Sequence: Synthetic oligonucleotide
  Target: SCNA; (+) strand; PAM type: YTN; PAM sequence: CTT
caacgttgttgacacctcat

SEQ ID NO: 80224 - DNA, 20 bp, Artificial Sequence
  Description of Artificial Sequence: Synthetic oligonucleotide
  Target: SCNA; (+) strand; PAM type: YTN; PAM sequence: TTC
aacgttgttgacacctcata

SEQ ID NO: 80225 - DNA, 20 bp, Artificial Sequence
  Description of Artificial Sequence: Synthetic oligonucleotide
  Target: SCNA; (+) strand; PAM type: YTN; PAM sequence: TTG
ttgacacctcatactgtatt

SEQ ID NO: 80226 - DNA, 20 bp, Artificial Sequence
  Description of Artificial Sequence: Synthetic oligonucleotide
  Target: SCNA; (+) strand; PAM type: YTN; PAM sequence: TTG
acacctcatactgtattagt

SEQ ID NO: 80227 - DNA, 20 bp, Artificial Sequence
  Description of Artificial Sequence: Synthetic oligonucleotide
  Target: SCNA; (+) strand; PAM type: YTN; PAM sequence: CTC
atactgtattagttccatat

SEQ ID NO: 80228 - DNA, 20 bp, Artificial Sequence
  Description of Artificial Sequence: Synthetic oligonucleotide
  Target: SCNA; (+) strand; PAM type: YTN; PAM sequence: CTG
tattagttccatatttaaaa

SEQ ID NO: 80229 - DNA, 20 bp, Artificial Sequence
  Description of Artificial Sequence: Synthetic oligonucleotide
  Target: SCNA; (+) strand; PAM type: YTN; PAM sequence: TTA
gttccatatttaaaatgaaa

SEQ ID NO: 80230 - DNA, 20 bp, Artificial Sequence
  Description of Artificial Sequence: Synthetic oligonucleotide
  Target: SCNA; (+) strand; PAM type: YTN; PAM sequence: TTC
catatttaaaatgaaagtta

SEQ ID NO: 80231 - DNA, 20 bp, Artificial Sequence
  Description of Artificial Sequence: Synthetic oligonucleotide
  Target: SCNA; (+) strand; PAM type: YTN; PAM sequence: TTT
aaaatgaaagttataatatc

SEQ ID NO: 80232 - DNA, 20 bp, Artificial Sequence
  Description of Artificial Sequence: Synthetic oligonucleotide
  Target: SCNA; (+) strand; PAM type: YTN; PAM sequence: TTA
aaatgaaagttataatatct

SEQ ID NO: 80233 - DNA, 20 bp, Artificial Sequence
  Description of Artificial Sequence: Synthetic oligonucleotide
  Target: SCNA; (+) strand; PAM type: YTN; PAM sequence: TTA
taatatctttggtataatct

SEQ ID NO: 80234 - DNA, 20 bp, Artificial Sequence
  Description of Artificial Sequence: Synthetic oligonucleotide
  Target: SCNA; (+) strand; PAM type: YTN; PAM sequence: CTT
tggtataatcttattcgtgt

SEQ ID NO: 80235 - DNA, 20 bp, Artificial Sequence
  Description of Artificial Sequence: Synthetic oligonucleotide
  Target: SCNA; (+) strand; PAM type: YTN; PAM sequence: TTT
ggtataatcttattcgtgtc

SEQ ID NO: 80236 - DNA, 20 bp, Artificial Sequence
  Description of Artificial Sequence: Synthetic oligonucleotide
  Target: SCNA; (+) strand; PAM type: YTN; PAM sequence: TTG
gtataatcttattcgtgtcc

SEQ ID NO: 80237 - DNA, 20 bp, Artificial Sequence
  Description of Artificial Sequence: Synthetic oligonucleotide
  Target: SCNA; (+) strand; PAM type: YTN; PAM sequence: CTT
attcgtgtcccatgtttgtc

SEQ ID NO: 80238 - DNA, 20 bp, Artificial Sequence
  Description of Artificial Sequence: Synthetic oligonucleotide
  Target: SCNA; (+) strand; PAM type: YTN; PAM sequence: TTA
ttcgtgtcccatgtttgtca

SEQ ID NO: 80239 - DNA, 20 bp, Artificial Sequence
  Description of Artificial Sequence: Synthetic oligonucleotide
  Target: SCNA; (+) strand; PAM type: YTN; PAM sequence: TTC
gtgtcccatgtttgtcaaaa

SEQ ID NO: 80240 - DNA, 20 bp, Artificial Sequence
  Description of Artificial Sequence: Synthetic oligonucleotide
  Target: SCNA; (+) strand; PAM type: YTN; PAM sequence: TTT
gtcaaaaaaattcagtcaaa

SEQ ID NO: 80241 - DNA, 20 bp, Artificial Sequence
  Description of Artificial Sequence: Synthetic oligonucleotide
  Target: SCNA; (+) strand; PAM type: YTN; PAM sequence: TTG
tcaaaaaaattcagtcaaaa

SEQ ID NO: 80242 - DNA, 20 bp, Artificial Sequence
  Description of Artificial Sequence: Synthetic oligonucleotide
  Target: SCNA; (+) strand; PAM type: YTN; PAM sequence: TTC
agtcaaaattcttctcagaa

SEQ ID NO: 80243 - DNA, 20 bp, Artificial Sequence
  Description of Artificial Sequence: Synthetic oligonucleotide
  Target: SCNA; (+) strand; PAM type: YTN; PAM sequence: TTC
ttctcagaattttaaaatct

SEQ ID NO: 80244 - DNA, 20 bp, Artificial Sequence
  Description of Artificial Sequence: Synthetic oligonucleotide
  Target: SCNA; (+) strand; PAM type: YTN; PAM sequence: CTT
ctcagaattttaaaatctac

SEQ ID NO: 80245 - DNA, 20 bp, Artificial Sequence
  Description of Artificial Sequence: Synthetic oligonucleotide
  Target: SCNA; (+) strand; PAM type: YTN; PAM sequence: TTC
tcagaattttaaaatctacc

SEQ ID NO: 80246 - DNA, 20 bp, Artificial Sequence
  Description of Artificial Sequence: Synthetic oligonucleotide
  Target: SCNA; (+) strand; PAM type: YTN; PAM sequence: CTC
agaattttaaaatctacctc

SEQ ID NO: 80247 - DNA, 20 bp, Artificial Sequence
  Description of Artificial Sequence: Synthetic oligonucleotide
  Target: SCNA; (+) strand; PAM type: YTN; PAM sequence: TTT
taaaatctacctcaaaacta

SEQ ID NO: 80248 - DNA, 20 bp, Artificial Sequence
  Description of Artificial Sequence: Synthetic oligonucleotide
  Target: SCNA; (+) strand; PAM type: YTN; PAM sequence: TTT
aaaatctacctcaaaactat

SEQ ID NO: 80249 - DNA, 20 bp, Artificial Sequence
  Description of Artificial Sequence: Synthetic oligonucleotide
  Target: SCNA; (+) strand; PAM type: YTN; PAM sequence: TTA
aaatctacctcaaaactata

SEQ ID NO: 80250 - DNA, 20 bp, Artificial Sequence
  Description of Artificial Sequence: Synthetic oligonucleotide
  Target: SCNA; (+) strand; PAM type: YTN; PAM sequence: CTA
cctcaaaactatatctctgg

SEQ ID NO: 80251 - DNA, 20 bp, Artificial Sequence
  Description of Artificial Sequence: Synthetic oligonucleotide
  Target: SCNA; (+) strand; PAM type: YTN; PAM sequence: CTC
aaaactatatctctggttgg

SEQ ID NO: 80252 - DNA, 20 bp, Artificial Sequence
  Description of Artificial Sequence: Synthetic oligonucleotide
  Target: SCNA; (+) strand; PAM type: YTN; PAM sequence: CTA
tatctctggttggtatgtat

SEQ ID NO: 80253 - DNA, 20 bp, Artificial Sequence
  Description of Artificial Sequence: Synthetic oligonucleotide
  Target: SCNA; (+) strand; PAM type: YTN; PAM sequence: CTC
tggttggtatgtattttaag

SEQ ID NO: 80254 - DNA, 20 bp, Artificial Sequence
  Description of Artificial Sequence: Synthetic oligonucleotide
  Target: SCNA; (+) strand; PAM type: YTN; PAM sequence: CTG
gttggtatgtattttaagtc

SEQ ID NO: 80255 - DNA, 20 bp, Artificial Sequence
  Description of Artificial Sequence: Synthetic oligonucleotide
  Target: SCNA; (+) strand; PAM type: YTN; PAM sequence: TTG
gtatgtattttaagtctctc

SEQ ID NO: 80256 - DNA, 20 bp, Artificial Sequence
  Description of Artificial Sequence: Synthetic oligonucleotide
  Target: SCNA; (+) strand; PAM type: YTN; PAM sequence: TTT
taagtctctcatttcccaca

SEQ ID NO: 80257 - DNA, 20 bp, Artificial Sequence
  Description of Artificial Sequence: Synthetic oligonucleotide
  Target: SCNA; (+) strand; PAM type: YTN; PAM sequence: TTT
aagtctctcatttcccacaa

SEQ ID NO: 80258 - DNA, 20 bp, Artificial Sequence
  Description of Artificial Sequence: Synthetic oligonucleotide
  Target: SCNA; (+) strand; PAM type: YTN; PAM sequence: TTA
agtctctcatttcccacaaa

SEQ ID NO: 80259 - DNA, 20 bp, Artificial Sequence
  Description of Artificial Sequence: Synthetic oligonucleotide
  Target: SCNA; (+) strand; PAM type: YTN; PAM sequence: CTC
tcatttcccacaaatatgta

SEQ ID NO: 80260 - DNA, 20 bp, Artificial Sequence
  Description of Artificial Sequence: Synthetic oligonucleotide
  Target: SCNA; (+) strand; PAM type: YTN; PAM sequence: CTC
atttcccacaaatatgtatt

SEQ ID NO: 80261 - DNA, 20 bp, Artificial Sequence
  Description of Artificial Sequence: Synthetic oligonucleotide
  Target: SCNA; (+) strand; PAM type: YTN; PAM sequence: TTT
cccacaaatatgtatttggc

SEQ ID NO: 80262 - DNA, 20 bp, Artificial Sequence
  Description of Artificial Sequence: Synthetic oligonucleotide
  Target: SCNA; (+) strand; PAM type: YTN; PAM sequence: TTC
ccacaaatatgtatttggca

SEQ ID NO: 80263 - DNA, 20 bp, Artificial Sequence
  Description of Artificial Sequence: Synthetic oligonucleotide
  Target: SCNA; (+) strand; PAM type: YTN; PAM sequence: TTT
ggcaatgaactgttatgtaa

SEQ ID NO: 80264 - DNA, 20 bp, Artificial Sequence
  Description of Artificial Sequence: Synthetic oligonucleotide
  Target: SCNA; (+) strand; PAM type: YTN; PAM sequence: TTG
gcaatgaactgttatgtaat

SEQ ID NO: 80265 - DNA, 20 bp, Artificial Sequence
  Description of Artificial Sequence: Synthetic oligonucleotide
  Target: SCNA; (+) strand; PAM type: YTN; PAM sequence: CTG
ttatgtaatatgcagatatg

SEQ ID NO: 80266 - DNA, 20 bp, Artificial Sequence
  Description of Artificial Sequence: Synthetic oligonucleotide
  Target: SCNA; (+) strand; PAM type: YTN; PAM sequence: TTA
tgtaatatgcagatatgcca

SEQ ID NO: 80267 - DNA, 20 bp, Artificial Sequence
  Description of Artificial Sequence: Synthetic oligonucleotide
  Target: SCNA; (+) strand; PAM type: YTN; PAM sequence: TTT
aataagagatgatgtcacta

SEQ ID NO: 80268 - DNA, 20 bp, Artificial Sequence
  Description of Artificial Sequence: Synthetic oligonucleotide
  Target: SCNA; (+) strand; PAM type: YTN; PAM sequence: TTA
ataagagatgatgtcactat

SEQ ID NO: 80269 - DNA, 20 bp, Artificial Sequence
  Description of Artificial Sequence: Synthetic oligonucleotide
  Target: SCNA; (+) strand; PAM type: YTN; PAM sequence: CTA
taaagaaataagtaaaagaa

SEQ ID NO: 80270 - DNA, 20 bp, Artificial Sequence
  Description of Artificial Sequence: Synthetic oligonucleotide
  Target: SCNA; (+) strand; PAM type: YTN; PAM sequence: CTT
tattttggaaattaggaaat

SEQ ID NO: 80271 - DNA, 20 bp, Artificial Sequence
  Description of Artificial Sequence: Synthetic oligonucleotide
  Target: SCNA; (+) strand; PAM type: YTN; PAM sequence: TTT
attttggaaattaggaaatt

SEQ ID NO: 80272 - DNA, 20 bp, Artificial Sequence
  Description of Artificial Sequence: Synthetic oligonucleotide
  Target: SCNA; (+) strand; PAM type: YTN; PAM sequence: TTA
ttttggaaattaggaaatta

SEQ ID NO: 80273 - DNA, 20 bp, Artificial Sequence
  Description of Artificial Sequence: Synthetic oligonucleotide
  Target: SCNA; (+) strand; PAM type: YTN; PAM sequence: TTT
tggaaattaggaaattaggc

SEQ ID NO: 80274 - DNA, 20 bp, Artificial Sequence
  Description of Artificial Sequence: Synthetic oligonucleotide
  Target: SCNA; (+) strand; PAM type: YTN; PAM sequence: TTT
ggaaattaggaaattaggca

SEQ ID NO: 80275 - DNA, 20 bp, Artificial Sequence
  Description of Artificial Sequence: Synthetic oligonucleotide
  Target: SCNA; (+) strand; PAM type: YTN; PAM sequence: TTG
gaaattaggaaattaggcac

SEQ ID NO: 80276 - DNA, 20 bp, Artificial Sequence
  Description of Artificial Sequence: Synthetic oligonucleotide
  Target: SCNA; (+) strand; PAM type: YTN; PAM sequence: TTA
ggaaattaggcacaaaggga

SEQ ID NO: 80277 - DNA, 20 bp, Artificial Sequence
  Description of Artificial Sequence: Synthetic oligonucleotide
  Target: SCNA; (+) strand; PAM type: YTN; PAM sequence: TTA
ggcacaaagggatttgttac

SEQ ID NO: 80278 - DNA, 20 bp, Artificial Sequence
  Description of Artificial Sequence: Synthetic oligonucleotide
  Target: SCNA; (+) strand; PAM type: YTN; PAM sequence: TTT
gttactccaaggaagagaaa

SEQ ID NO: 80279 - DNA, 20 bp, Artificial Sequence
  Description of Artificial Sequence: Synthetic oligonucleotide
  Target: SCNA; (+) strand; PAM type: YTN; PAM sequence: TTG
ttactccaaggaagagaaat

SEQ ID NO: 80280 - DNA, 20 bp, Artificial Sequence
  Description of Artificial Sequence: Synthetic oligonucleotide
  Target: SCNA; (+) strand; PAM type: YTN; PAM sequence: TTA
ctccaaggaagagaaattcc

SEQ ID NO: 80281 - DNA, 20 bp, Artificial Sequence
  Description of Artificial Sequence: Synthetic oligonucleotide
  Target: SCNA; (+) strand; PAM type: YTN; PAM sequence: CTC
caaggaagagaaattccaag

SEQ ID NO: 80282 - DNA, 20 bp, Artificial Sequence
  Description of Artificial Sequence: Synthetic oligonucleotide
  Target: SCNA; (+) strand; PAM type: YTN; PAM sequence: TTC
caagacttacaattaacatg

SEQ ID NO: 80283 - DNA, 20 bp, Artificial Sequence
  Description of Artificial Sequence: Synthetic oligonucleotide
  Target: SCNA; (+) strand; PAM type: YTN; PAM sequence: CTT
acaattaacatgaaagccct

SEQ ID NO: 80284 - DNA, 20 bp, Artificial Sequence
  Description of Artificial Sequence: Synthetic oligonucleotide
  Target: SCNA; (+) strand; PAM type: YTN; PAM sequence: TTA
caattaacatgaaagccctc

SEQ ID NO: 80285 - DNA, 20 bp, Artificial Sequence
  Description of Artificial Sequence: Synthetic oligonucleotide
  Target: SCNA; (+) strand; PAM type: YTN; PAM sequence: TTA
acatgaaagccctcattctt

SEQ ID NO: 80286 - DNA, 20 bp, Artificial Sequence
  Description of Artificial Sequence: Synthetic oligonucleotide
  Target: SCNA; (+) strand; PAM type: YTN; PAM sequence: CTC
attctttctgaaatgtcact

SEQ ID NO: 80287 - DNA, 20 bp, Artificial Sequence
  Description of Artificial Sequence: Synthetic oligonucleotide
  Target: SCNA; (+) strand; PAM type: YTN; PAM sequence: TTC
tttctgaaatgtcactgttc

SEQ ID NO: 80288 - DNA, 20 bp, Artificial Sequence
  Description of Artificial Sequence: Synthetic oligonucleotide
  Target: SCNA; (+) strand; PAM type: YTN; PAM sequence: CTT
tctgaaatgtcactgttcct

SEQ ID NO: 80289 - DNA, 20 bp, Artificial Sequence
  Description of Artificial Sequence: Synthetic oligonucleotide
  Target: SCNA; (+) strand; PAM type: YTN; PAM sequence: TTT
ctgaaatgtcactgttcctt

SEQ ID NO: 80290 - DNA, 20 bp, Artificial Sequence
  Description of Artificial Sequence: Synthetic oligonucleotide
  Target: SCNA; (+) strand; PAM type: YTN; PAM sequence: TTC
tgaaatgtcactgttccttt

SEQ ID NO: 80291 - DNA, 20 bp, Artificial Sequence
  Description of Artificial Sequence: Synthetic oligonucleotide
  Target: SCNA; (+) strand; PAM type: YTN; PAM sequence: CTG
aaatgtcactgttcctttgg

SEQ ID NO: 80292 - DNA, 20 bp, Artificial Sequence
  Description of Artificial Sequence: Synthetic oligonucleotide
  Target: SCNA; (+) strand; PAM type: YTN; PAM sequence: CTG
ttcctttggcattttactac

SEQ ID NO: 80293 - DNA, 20 bp, Artificial Sequence
  Description of Artificial Sequence: Synthetic oligonucleotide
  Target: SCNA; (+) strand; PAM type: YTN; PAM sequence: TTC
ctttggcattttactacatt

SEQ ID NO: 80294 - DNA, 20 bp, Artificial Sequence
  Description of Artificial Sequence: Synthetic oligonucleotide
  Target: SCNA; (+) strand; PAM type: YTN; PAM sequence: CTT
tggcattttactacattttt

SEQ ID NO: 80295 - DNA, 20 bp, Artificial Sequence
  Description of Artificial Sequence: Synthetic oligonucleotide
  Target: SCNA; (+) strand; PAM type: YTN; PAM sequence: TTT
ggcattttactacatttttt

SEQ ID NO: 80296 - DNA, 20 bp, Artificial Sequence
  Description of Artificial Sequence: Synthetic oligonucleotide
  Target: SCNA; (+) strand; PAM type: YTN; PAM sequence: TTG
gcattttactacattttttg

SEQ ID NO: 80297 - DNA, 20 bp, Artificial Sequence
  Description of Artificial Sequence: Synthetic oligonucleotide
  Target: SCNA; (+) strand; PAM type: YTN; PAM sequence: TTT
tactacattttttgtttcat

SEQ ID NO: 80298 - DNA, 20 bp, Artificial Sequence
  Description of Artificial Sequence: Synthetic oligonucleotide
  Target: SCNA; (+) strand; PAM type: YTN; PAM sequence: TTT
actacattttttgtttcatt

SEQ ID NO: 80299 - DNA, 20 bp, Artificial Sequence
  Description of Artificial Sequence: Synthetic oligonucleotide
  Target: SCNA; (+) strand; PAM type: YTN; PAM sequence: TTA
ctacattttttgtttcatta

SEQ ID NO: 80300 - DNA, 20 bp, Artificial Sequence
  Description of Artificial Sequence: Synthetic oligonucleotide
  Target: SCNA; (+) strand; PAM type: YTN; PAM sequence: CTA
cattttttgtttcattaact

SEQ ID NO: 80301 - DNA, 20 bp, Artificial Sequence
  Description of Artificial Sequence: Synthetic oligonucleotide
  Target: SCNA; (+) strand; PAM type: YTN; PAM sequence: TTT
tttgtttcattaactttctt

SEQ ID NO: 80302 - DNA, 20 bp, Artificial Sequence
  Description of Artificial Sequence: Synthetic oligonucleotide
  Target: SCNA; (+) strand; PAM type: YTN; PAM sequence: TTT
ttgtttcattaactttcttc

SEQ ID NO: 80303 - DNA, 20 bp, Artificial Sequence
  Description of Artificial Sequence: Synthetic oligonucleotide
  Target: SCNA; (+) strand; PAM type: YTN; PAM sequence: TTT
tgtttcattaactttcttcc

SEQ ID NO: 80304 - DNA, 20 bp, Artificial Sequence
  Description of Artificial Sequence: Synthetic oligonucleotide
  Target: SCNA; (+) strand; PAM type: YTN; PAM sequence: TTT
gtttcattaactttcttcca

SEQ ID NO: 80305 - DNA, 20 bp, Artificial Sequence
  Description of Artificial Sequence: Synthetic oligonucleotide
  Target: SCNA; (+) strand; PAM type: YTN; PAM sequence: TTG
tttcattaactttcttccag

SEQ ID NO: 80306 - DNA, 20 bp, Artificial Sequence
  Description of Artificial Sequence: Synthetic oligonucleotide
  Target: SCNA; (+) strand; PAM type: YTN; PAM sequence: TTT
cattaactttcttccagaaa

SEQ ID NO: 80307 - DNA, 20 bp, Artificial Sequence
  Description of Artificial Sequence: Synthetic oligonucleotide
  Target: SCNA; (+) strand; PAM type: YTN; PAM sequence: TTC
attaactttcttccagaaat

SEQ ID NO: 80308 - DNA, 20 bp, Artificial Sequence
  Description of Artificial Sequence: Synthetic oligonucleotide
  Target: SCNA; (+) strand; PAM type: YTN; PAM sequence: TTA
actttcttccagaaattgaa

SEQ ID NO: 80309 - DNA, 20 bp, Artificial Sequence
  Description of Artificial Sequence: Synthetic oligonucleotide
  Target: SCNA; (+) strand; PAM type: YTN; PAM sequence: CTT
tcttccagaaattgaaacaa

SEQ ID NO: 80310 - DNA, 20 bp, Artificial Sequence
  Description of Artificial Sequence: Synthetic oligonucleotide
  Target: SCNA; (+) strand; PAM type: YTN; PAM sequence: TTT
cttccagaaattgaaacaat

SEQ ID NO: 80311 - DNA, 20 bp, Artificial Sequence
  Description of Artificial Sequence: Synthetic oligonucleotide
  Target: SCNA; (+) strand; PAM type: YTN; PAM sequence: TTC
ttccagaaattgaaacaatc

SEQ ID NO: 80312 - DNA, 20 bp, Artificial Sequence
  Description of Artificial Sequence: Synthetic oligonucleotide
  Target: SCNA; (+) strand; PAM type: YTN; PAM sequence: CTT
ccagaaattgaaacaatcat

SEQ ID NO: 80313 - DNA, 20 bp, Artificial Sequence
  Description of Artificial Sequence: Synthetic oligonucleotide
  Target: SCNA; (+) strand; PAM type: YTN; PAM sequence: TTC
cagaaattgaaacaatcata

SEQ ID NO: 80314 - DNA, 20 bp, Artificial Sequence
  Description of Artificial Sequence: Synthetic oligonucleotide
  Target: SCNA; (+) strand; PAM type: YTN; PAM sequence: TTG
aaacaatcataataattata

SEQ ID NO: 80315 - DNA, 20 bp, Artificial Sequence
  Description of Artificial Sequence: Synthetic oligonucleotide
  Target: SCNA; (+) strand; PAM type: YTN; PAM sequence: TTA
taaaatttgcatggcattta

SEQ ID NO: 80316 - DNA, 20 bp, Artificial Sequence
  Description of Artificial Sequence: Synthetic oligonucleotide
  Target: SCNA; (+) strand; PAM type: YTN; PAM sequence: TTT
gcatggcatttatctgggtt

SEQ ID NO: 80317 - DNA, 20 bp, Artificial Sequence
  Description of Artificial Sequence: Synthetic oligonucleotide
  Target: SCNA; (+) strand; PAM type: YTN; PAM sequence: TTG
catggcatttatctgggtta

SEQ ID NO: 80318 - DNA, 20 bp, Artificial Sequence
  Description of Artificial Sequence: Synthetic oligonucleotide
  Target: SCNA; (+) strand; PAM type: YTN; PAM sequence: TTT
atctgggttaatgcctgaaa

SEQ ID NO: 80319 - DNA, 20 bp, Artificial Sequence
  Description of Artificial Sequence: Synthetic oligonucleotide
  Target: SCNA; (+) strand; PAM type: YTN; PAM sequence: TTA
tctgggttaatgcctgaaac

SEQ ID NO: 80320 - DNA, 20 bp, Artificial Sequence
  Description of Artificial Sequence: Synthetic oligonucleotide
  Target: SCNA; (+) strand; PAM type: YTN; PAM sequence: CTG
ggttaatgcctgaaacaagc

SEQ ID NO: 80321 - DNA, 20 bp, Artificial Sequence
  Description of Artificial Sequence: Synthetic oligonucleotide
  Target: SCNA; (+) strand; PAM type: YTN; PAM sequence: TTA
atgcctgaaacaagcaagac

SEQ ID NO: 80322 - DNA, 20 bp, Artificial Sequence
  Description of Artificial Sequence: Synthetic oligonucleotide
  Target: SCNA; (+) strand; PAM type: YTN; PAM sequence: CTG
aaacaagcaagaccaatata

SEQ ID NO: 80323 - DNA, 20 bp, Artificial Sequence
  Description of Artificial Sequence: Synthetic oligonucleotide
  Target: SCNA; (+) strand; PAM type: YTN; PAM sequence: CTT
tttcacaaggggagggtcag

SEQ ID NO: 80324 - DNA, 20 bp, Artificial Sequence
  Description of Artificial Sequence: Synthetic oligonucleotide
  Target: SCNA; (+) strand; PAM type: YTN; PAM sequence: TTT
ttcacaaggggagggtcagg

SEQ ID NO: 80325 - DNA, 20 bp, Artificial Sequence
  Description of Artificial Sequence: Synthetic oligonucleotide
  Target: SCNA; (+) strand; PAM type: YTN; PAM sequence: TTT
tcacaaggggagggtcaggt

SEQ ID NO: 80326 - DNA, 20 bp, Artificial Sequence
  Description of Artificial Sequence: Synthetic oligonucleotide
  Target: SCNA; (+) strand; PAM type: YTN; PAM sequence: TTT
cacaaggggagggtcaggta

SEQ ID NO: 80327 - DNA, 20 bp, Artificial Sequence
  Description of Artificial Sequence: Synthetic oligonucleotide
  Target: SCNA; (+) strand; PAM type: YTN; PAM sequence: TTC
acaaggggagggtcaggtag

SEQ ID NO: 80328 - DNA, 20 bp, Artificial Sequence
  Description of Artificial Sequence: Synthetic oligonucleotide
  Target: SCNA; (+) strand; PAM type: YTN; PAM sequence: TTC
cccacagtaagtatcttgct

SEQ ID NO: 80329 - DNA, 20 bp, Artificial Sequence
  Description of Artificial Sequence: Synthetic oligonucleotide
  Target: SCNA; (+) strand; PAM type: YTN; PAM sequence: CTT
gctcctgcctccaggcctca

SEQ ID NO: 80330 - DNA, 20 bp, Artificial Sequence
  Description of Artificial Sequence: Synthetic oligonucleotide
  Target: SCNA; (+) strand; PAM type: YTN; PAM sequence: TTG
ctcctgcctccaggcctcac

SEQ ID NO: 80331 - DNA, 20 bp, Artificial Sequence
  Description of Artificial Sequence: Synthetic oligonucleotide
  Target: SCNA; (+) strand; PAM type: YTN; PAM sequence: CTC
ctgcctccaggcctcacatg

SEQ ID NO: 80332 - DNA, 20 bp, Artificial Sequence
  Description of Artificial Sequence: Synthetic oligonucleotide
  Target: SCNA; (+) strand; PAM type: YTN; PAM sequence: CTG
cctccaggcctcacatgaaa

SEQ ID NO: 80333 - DNA, 20 bp, Artificial Sequence
  Description of Artificial Sequence: Synthetic oligonucleotide
  Target: SCNA; (+) strand; PAM type: YTN; PAM sequence: CTC
caggcctcacatgaaaatga

SEQ ID NO: 80334 - DNA, 20 bp, Artificial Sequence
  Description of Artificial Sequence: Synthetic oligonucleotide
  Target: SCNA; (+) strand; PAM type: YTN; PAM sequence: CTC
acatgaaaatgaaccgtaat

SEQ ID NO: 80335 - DNA, 20 bp, Artificial Sequence
  Description of Artificial Sequence: Synthetic oligonucleotide
  Target: SCNA; (+) strand; PAM type: YTN; PAM sequence: CTC
accagcttataaatgtaaca

SEQ ID NO: 80336 - DNA, 20 bp, Artificial Sequence
  Description of Artificial Sequence: Synthetic oligonucleotide
  Target: SCNA; (+) strand; PAM type: YTN; PAM sequence: CTT
ataaatgtaacacaaaacgt

SEQ ID NO: 80337 - DNA, 20 bp, Artificial Sequence
  Description of Artificial Sequence: Synthetic oligonucleotide
  Target: SCNA; (+) strand; PAM type: YTN; PAM sequence: TTA
taaatgtaacacaaaacgta

SEQ ID NO: 80338 - DNA, 20 bp, Artificial Sequence
  Description of Artificial Sequence: Synthetic oligonucleotide
  Target: SCNA; (+) strand; PAM type: YTN; PAM sequence: CTT
gcccaactggtcctttttga

SEQ ID NO: 80339 - DNA, 20 bp, Artificial Sequence
  Description of Artificial Sequence: Synthetic oligonucleotide
  Target: SCNA; (+) strand; PAM type: YTN; PAM sequence: TTG
cccaactggtcctttttgac

SEQ ID NO: 80340 - DNA, 20 bp, Artificial Sequence
  Description of Artificial Sequence: Synthetic oligonucleotide
  Target: SCNA; (+) strand; PAM type: YTN; PAM sequence: CTG
gtcctttttgacaaagccag

SEQ ID NO: 80341 - DNA, 20 bp, Artificial Sequence
  Description of Artificial Sequence: Synthetic oligonucleotide
  Target: SCNA; (+) strand; PAM type: YTN; PAM sequence: CTT
tttgacaaagccagtggctg

SEQ ID NO: 80342 - DNA, 20 bp, Artificial Sequence
  Description of Artificial Sequence: Synthetic oligonucleotide
  Target: SCNA; (+) strand; PAM type: YTN; PAM sequence: TTT
ttgacaaagccagtggctgc

SEQ ID NO: 80343 - DNA, 20 bp, Artificial Sequence
  Description of Artificial Sequence: Synthetic oligonucleotide
  Target: SCNA; (+) strand; PAM type: YTN; PAM sequence: TTT
tgacaaagccagtggctgct

SEQ ID NO: 80344 - DNA, 20 bp, Artificial Sequence
  Description of Artificial Sequence: Synthetic oligonucleotide
  Target: SCNA; (+) strand; PAM type: YTN; PAM sequence: TTT
gacaaagccagtggctgctg

SEQ ID NO: 80345 - DNA, 20 bp, Artificial Sequence
  Description of Artificial Sequence: Synthetic oligonucleotide
  Target: SCNA; (+) strand; PAM type: YTN; PAM sequence: TTG
acaaagccagtggctgctgc

SEQ ID NO: 80346 - DNA, 20 bp, Artificial Sequence
  Description of Artificial Sequence: Synthetic oligonucleotide
  Target: SCNA; (+) strand; PAM type: YTN; PAM sequence: CTG
ctgcaatgctccctgctccc

SEQ ID NO: 80347 - DNA, 20 bp, Artificial Sequence
  Description of Artificial Sequence: Synthetic oligonucleotide
  Target: SCNA; (+) strand; PAM type: YTN; PAM sequence: CTG
caatgctccctgctccctcc

SEQ ID NO: 80348 - DNA, 20 bp, Artificial Sequence
  Description of Artificial Sequence: Synthetic oligonucleotide
  Target: SCNA; (+) strand; PAM type: YTN; PAM sequence: CTC
cctgctccctccactgtctt

SEQ ID NO: 80349 - DNA, 20 bp, Artificial Sequence
  Description of Artificial Sequence: Synthetic oligonucleotide
  Target: SCNA; (+) strand; PAM type: YTN; PAM sequence: CTG
ctccctccactgtcttctgg

SEQ ID NO: 80350 - DNA, 20 bp, Artificial Sequence
  Description of Artificial Sequence: Synthetic oligonucleotide
  Target: SCNA; (+) strand; PAM type: YTN; PAM sequence: CTC
cctccactgtcttctgggct

SEQ ID NO: 80351 - DNA, 20 bp, Artificial Sequence
  Description of Artificial Sequence: Synthetic oligonucleotide
  Target: SCNA; (+) strand; PAM type: YTN; PAM sequence: CTC
cactgtcttctgggctactg

SEQ ID NO: 80352 - DNA, 20 bp, Artificial Sequence
  Description of Artificial Sequence: Synthetic oligonucleotide
  Target: SCNA; (+) strand; PAM type: YTN; PAM sequence: CTG
tcttctgggctactgctgtc

SEQ ID NO: 80353 - DNA, 20 bp, Artificial Sequence
  Description of Artificial Sequence: Synthetic oligonucleotide
  Target: SCNA; (+) strand; PAM type: YTN; PAM sequence: CTT
ctgggctactgctgtcacac

SEQ ID NO: 80354 - DNA, 20 bp, Artificial Sequence
  Description of Artificial Sequence: Synthetic oligonucleotide
  Target: SCNA; (+) strand; PAM type: YTN; PAM sequence: TTC
tgggctactgctgtcacacc

SEQ ID NO: 80355 - DNA, 20 bp, Artificial Sequence
  Description of Artificial Sequence: Synthetic oligonucleotide
  Target: SCNA; (+) strand; PAM type: YTN; PAM sequence: CTG
ggctactgctgtcacacccg

SEQ ID NO: 80356 - DNA, 20 bp, Artificial Sequence
  Description of Artificial Sequence: Synthetic oligonucleotide
  Target: SCNA; (+) strand; PAM type: YTN; PAM sequence: CTA
ctgctgtcacacccgtcacc

SEQ ID NO: 80357 - DNA, 20 bp, Artificial Sequence
  Description of Artificial Sequence: Synthetic oligonucleotide
  Target: SCNA; (+) strand; PAM type: YTN; PAM sequence: CTG
ctgtcacacccgtcaccact

SEQ ID NO: 80358 - DNA, 20 bp, Artificial Sequence
  Description of Artificial Sequence: Synthetic oligonucleotide
  Target: SCNA; (+) strand; PAM type: YTN; PAM sequence: CTG
tcacacccgtcaccactgct

SEQ ID NO: 80359 - DNA, 20 bp, Artificial Sequence
  Description of Artificial Sequence: Synthetic oligonucleotide
  Target: SCNA; (+) strand; PAM type: YTN; PAM sequence: CTG
ctcctccaacatttgtcact

SEQ ID NO: 80360 - DNA, 20 bp, Artificial Sequence
  Description of Artificial Sequence: Synthetic oligonucleotide
  Target: SCNA; (+) strand; PAM type: YTN; PAM sequence: CTC
ctccaacatttgtcacttgc

SEQ ID NO: 80361 - DNA, 20 bp, Artificial Sequence
  Description of Artificial Sequence: Synthetic oligonucleotide
  Target: SCNA; (+) strand; PAM type: YTN; PAM sequence: CTC
caacatttgtcacttgctct

SEQ ID NO: 80362 - DNA, 20 bp, Artificial Sequence
  Description of Artificial Sequence: Synthetic oligonucleotide
  Target: SCNA; (+) strand; PAM type: YTN; PAM sequence: TTT
gtcacttgctctttggtctt

SEQ ID NO: 80363 - DNA, 20 bp, Artificial Sequence
  Description of Artificial Sequence: Synthetic oligonucleotide
  Target: SCNA; (+) strand; PAM type: YTN; PAM sequence: TTG
tcacttgctctttggtcttc

SEQ ID NO: 80364 - DNA, 20 bp, Artificial Sequence
  Description of Artificial Sequence: Synthetic oligonucleotide
  Target: SCNA; (+) strand; PAM type: YTN; PAM sequence: CTT
gctctttggtcttctcagcc

SEQ ID NO: 80365 - DNA, 20 bp, Artificial Sequence
  Description of Artificial Sequence: Synthetic oligonucleotide
  Target: SCNA; (+) strand; PAM type: YTN; PAM sequence: TTG
ctctttggtcttctcagcca

SEQ ID NO: 80366 - DNA, 20 bp, Artificial Sequence
  Description of Artificial Sequence: Synthetic oligonucleotide
  Target: SCNA; (+) strand; PAM type: YTN; PAM sequence: CTC
tttggtcttctcagccactg

SEQ ID NO: 80367 - DNA, 20 bp, Artificial Sequence
  Description of Artificial Sequence: Synthetic oligonucleotide
  Target: SCNA; (+) strand; PAM type: YTN; PAM sequence: CTT
tggtcttctcagccactggt

SEQ ID NO: 80368 - DNA, 20 bp, Artificial Sequence
  Description of Artificial Sequence: Synthetic oligonucleotide
  Target: SCNA; (+) strand; PAM type: YTN; PAM sequence: TTT
ggtcttctcagccactggta

SEQ ID NO: 80369 - DNA, 20 bp, Artificial Sequence
  Description of Artificial Sequence: Synthetic oligonucleotide
  Target: SCNA; (+) strand; PAM type: YTN; PAM sequence: TTG
gtcttctcagccactggtac

SEQ ID NO: 80370 - DNA, 20 bp, Artificial Sequence
  Description of Artificial Sequence: Synthetic oligonucleotide
  Target: SCNA; (+) strand; PAM type: YTN; PAM sequence: CTT
ctcagccactggtacaaata

SEQ ID NO: 80371 - DNA, 20 bp, Artificial Sequence
  Description of Artificial Sequence: Synthetic oligonucleotide
  Target: SCNA; (+) strand; PAM type: YTN; PAM sequence: TTC
tcagccactggtacaaataa

SEQ ID NO: 80372 - DNA, 20 bp, Artificial Sequence
  Description of Artificial Sequence: Synthetic oligonucleotide
  Target: SCNA; (+) strand; PAM type: YTN; PAM sequence: CTC
agccactggtacaaataaag

SEQ ID NO: 80373 - DNA, 20 bp, Artificial Sequence
  Description of Artificial Sequence: Synthetic oligonucleotide
  Target: SCNA; (+) strand; PAM type: YTN; PAM sequence: CTG
gtacaaataaagagcaacaa

SEQ ID NO: 80374 - DNA, 20 bp, Artificial Sequence
  Description of Artificial Sequence: Synthetic oligonucleotide
  Target: SCNA; (+) strand; PAM type: YTN; PAM sequence: TTA
aagggtggtagaataacagt

SEQ ID NO: 80375 - DNA, 20 bp, Artificial Sequence
  Description of Artificial Sequence: Synthetic oligonucleotide
  Target: SCNA; (+) strand; PAM type: YTN; PAM sequence: CTT
aaaatcattccacttccact

SEQ ID NO: 80376 - DNA, 20 bp, Artificial Sequence
  Description of Artificial Sequence: Synthetic oligonucleotide
  Target: SCNA; (+) strand; PAM type: YTN; PAM sequence: TTA
aaatcattccacttccacta

SEQ ID NO: 80377 - DNA, 20 bp, Artificial Sequence
  Description of Artificial Sequence: Synthetic oligonucleotide
  Target: SCNA; (+) strand; PAM type: YTN; PAM sequence: TTC
cacttccactagccatcggc

SEQ ID NO: 80378 - DNA, 20 bp, Artificial Sequence
  Description of Artificial Sequence: Synthetic oligonucleotide
  Target: SCNA; (+) strand; PAM type: YTN; PAM sequence: CTT
ccactagccatcggcttcca

SEQ ID NO: 80379 - DNA, 20 bp, Artificial Sequence
  Description of Artificial Sequence: Synthetic oligonucleotide
  Target: SCNA; (+) strand; PAM type: YTN; PAM sequence: TTC
cactagccatcggcttccat

SEQ ID NO: 80380 - DNA, 20 bp, Artificial Sequence
  Description of Artificial Sequence: Synthetic oligonucleotide
  Target: SCNA; (+) strand; PAM type: YTN; PAM sequence: CTA
gccatcggcttccatacacc

SEQ ID NO: 80381 - DNA, 20 bp, Artificial Sequence
  Description of Artificial Sequence: Synthetic oligonucleotide
  Target: SCNA; (+) strand; PAM type: YTN; PAM sequence: CTT
ccatacacctgtatctacac

SEQ ID NO: 80382 - DNA, 20 bp, Artificial Sequence
  Description of Artificial Sequence: Synthetic oligonucleotide
  Target: SCNA; (+) strand; PAM type: YTN; PAM sequence: TTC
catacacctgtatctacaca

SEQ ID NO: 80383 - DNA, 20 bp, Artificial Sequence
  Description of Artificial Sequence: Synthetic oligonucleotide
  Target: SCNA; (+) strand; PAM type: YTN; PAM sequence: CTG
tatctacacatgccatagat

SEQ ID NO: 80384 - DNA, 20 bp, Artificial Sequence
  Description of Artificial Sequence: Synthetic oligonucleotide
  Target: SCNA; (+) strand; PAM type: YTN; PAM sequence: CTA
cacatgccatagataactga

SEQ ID NO: 80385 - DNA, 20 bp, Artificial Sequence
  Description of Artificial Sequence: Synthetic oligonucleotide
  Target: SCNA; (+) strand; PAM type: YTN; PAM sequence: CTG
agtggtcagaagaaacaaaa

SEQ ID NO: 80386 - DNA, 20 bp, Artificial Sequence
  Description of Artificial Sequence: Synthetic oligonucleotide
  Target: SCNA; (+) strand; PAM type: YTN; PAM sequence: TTC
aaccaaacattgaatcttgg

SEQ ID NO: 80387 - DNA, 20 bp, Artificial Sequence
  Description of Artificial Sequence: Synthetic oligonucleotide
  Target: SCNA; (+) strand; PAM type: YTN; PAM sequence: TTG
aatcttggctaagatatttt

SEQ ID NO: 80388 - DNA, 20 bp, Artificial Sequence
  Description of Artificial Sequence: Synthetic oligonucleotide
  Target: SCNA; (+) strand; PAM type: YTN; PAM sequence: CTT
ggctaagatattttggctaa

SEQ ID NO: 80389 - DNA, 20 bp, Artificial Sequence
  Description of Artificial Sequence: Synthetic oligonucleotide
  Target: SCNA; (+) strand; PAM type: YTN; PAM sequence: TTG
gctaagatattttggctaaa

SEQ ID NO: 80390 - DNA, 20 bp, Artificial Sequence
  Description of Artificial Sequence: Synthetic oligonucleotide
  Target: SCNA; (+) strand; PAM type: YTN; PAM sequence: CTA
agatattttggctaaagtca

SEQ ID NO: 80391 - DNA, 20 bp, Artificial Sequence
  Description of Artificial Sequence: Synthetic oligonucleotide
  Target: SCNA; (+) strand; PAM type: YTN; PAM sequence: TTT
tggctaaagtcatgcagtat

SEQ ID NO: 80392 - DNA, 20 bp, Artificial Sequence
  Description of Artificial Sequence: Synthetic oligonucleotide
  Target: SCNA; (+) strand; PAM type: YTN; PAM sequence: TTT
ggctaaagtcatgcagtatt

SEQ ID NO: 80393 - DNA, 20 bp, Artificial Sequence
  Description of Artificial Sequence: Synthetic oligonucleotide
  Target: SCNA; (+) strand; PAM type: YTN; PAM sequence: TTG
gctaaagtcatgcagtatta

SEQ ID NO: 80394 - DNA, 20 bp, Artificial Sequence
  Description of Artificial Sequence: Synthetic oligonucleotide
  Target: SCNA; (+) strand; PAM type: YTN; PAM sequence: CTA
aagtcatgcagtattaaaaa

SEQ ID NO: 80395 - DNA, 20 bp, Artificial Sequence
  Description of Artificial Sequence: Synthetic oligonucleotide
  Target: SCNA; (+) strand; PAM type: YTN; PAM sequence: TTA
aaaagtgcttcaagtttaac

SEQ ID NO: 80396 - DNA, 20 bp, Artificial Sequence
  Description of Artificial Sequence: Synthetic oligonucleotide
  Target: SCNA; (+) strand; PAM type: YTN; PAM sequence: CTT
caagtttaacgatcaggaat

SEQ ID NO: 80397 - DNA, 20 bp, Artificial Sequence
  Description of Artificial Sequence: Synthetic oligonucleotide
  Target: SCNA; (+) strand; PAM type: YTN; PAM sequence: TTC
aagtttaacgatcaggaatg

SEQ ID NO: 80398 - DNA, 20 bp, Artificial Sequence
  Description of Artificial Sequence: Synthetic oligonucleotide
  Target: SCNA; (+) strand; PAM type: YTN; PAM sequence: TTT
aacgatcaggaatgtaaagc

SEQ ID NO: 80399 - DNA, 20 bp, Artificial Sequence
  Description of Artificial Sequence: Synthetic oligonucleotide
  Target: SCNA; (+) strand; PAM type: YTN; PAM sequence: TTA
acgatcaggaatgtaaagcc

SEQ ID NO: 80400 - DNA, 20 bp, Artificial Sequence
  Description of Artificial Sequence: Synthetic oligonucleotide
  Target: SCNA; (+) strand; PAM type: YTN; PAM sequence: TTT
ggatttggtttatactatgg

SEQ ID NO: 80401 - DNA, 20 bp, Artificial Sequence
  Description of Artificial Sequence: Synthetic oligonucleotide
  Target: SCNA; (+) strand; PAM type: YTN; PAM sequence: TTG
gatttggtttatactatgga

SEQ ID NO: 80402 - DNA, 20 bp, Artificial Sequence
  Description of Artificial Sequence: Synthetic oligonucleotide
  Target: SCNA; (+) strand; PAM type: YTN; PAM sequence: TTT
ggtttatactatggaaagtt

SEQ ID NO: 80403 - DNA, 20 bp, Artificial Sequence
  Description of Artificial Sequence: Synthetic oligonucleotide
  Target: SCNA; (+) strand; PAM type: YTN; PAM sequence: TTG
gtttatactatggaaagttt

SEQ ID NO: 80404 - DNA, 20 bp, Artificial Sequence
  Description of Artificial Sequence: Synthetic oligonucleotide
  Target: SCNA; (+) strand; PAM type: YTN; PAM sequence: TTT
atactatggaaagtttacag

SEQ ID NO: 80405 - DNA, 20 bp, Artificial Sequence
  Description of Artificial Sequence: Synthetic oligonucleotide
  Target: SCNA; (+) strand; PAM type: YTN; PAM sequence: TTA
tactatggaaagtttacaga

SEQ ID NO: 80406 - DNA, 20 bp, Artificial Sequence
  Description of Artificial Sequence: Synthetic oligonucleotide
  Target: SCNA; (+) strand; PAM type: YTN; PAM sequence: CTA
tggaaagtttacagaaagca

SEQ ID NO: 80407 - DNA, 20 bp, Artificial Sequence
  Description of Artificial Sequence: Synthetic oligonucleotide
  Target: SCNA; (+) strand; PAM type: YTN; PAM sequence: TTT
acagaaagcaattcttacag

SEQ ID NO: 80408 - DNA, 20 bp, Artificial Sequence
  Description of Artificial Sequence: Synthetic oligonucleotide
  Target: SCNA; (+) strand; PAM type: YTN; PAM sequence: TTA
cagaaagcaattcttacagg

SEQ ID NO: 80409 - DNA, 20 bp, Artificial Sequence
  Description of Artificial Sequence: Synthetic oligonucleotide
  Target: SCNA; (+) strand; PAM type: YTN; PAM sequence: TTC
ttacaggtgcagttatattt

SEQ ID NO: 80410 - DNA, 20 bp, Artificial Sequence
  Description of Artificial Sequence: Synthetic oligonucleotide
  Target: SCNA; (+) strand; PAM type: YTN; PAM sequence: CTT
acaggtgcagttatatttga

SEQ ID NO: 80411 - DNA, 20 bp, Artificial Sequence
  Description of Artificial Sequence: Synthetic oligonucleotide
  Target: SCNA; (+) strand; PAM type: YTN; PAM sequence: TTA
caggtgcagttatatttgaa

SEQ ID NO: 80412 - DNA, 20 bp, Artificial Sequence
  Description of Artificial Sequence: Synthetic oligonucleotide
  Target: SCNA; (+) strand; PAM type: YTN; PAM sequence: TTA
tatttgaaccagactcagca

SEQ ID NO: 80413 - DNA, 20 bp, Artificial Sequence
  Description of Artificial Sequence: Synthetic oligonucleotide
  Target: SCNA; (+) strand; PAM type: YTN; PAM sequence: TTT
gaaccagactcagcatgaat

SEQ ID NO: 80414 - DNA, 20 bp, Artificial Sequence
  Description of Artificial Sequence: Synthetic oligonucleotide
  Target: SCNA; (+) strand; PAM type: YTN; PAM sequence: TTG
aaccagactcagcatgaata

SEQ ID NO: 80415 - DNA, 20 bp, Artificial Sequence
  Description of Artificial Sequence: Synthetic oligonucleotide
  Target: SCNA; (+) strand; PAM type: YTN; PAM sequence: CTC
agcatgaatatttctttatt

SEQ ID NO: 80416 - DNA, 20 bp, Artificial Sequence
  Description of Artificial Sequence: Synthetic oligonucleotide
  Target: SCNA; (+) strand; PAM type: YTN; PAM sequence: TTT
ctttatttcaattcagtgcc

SEQ ID NO: 80417 - DNA, 20 bp, Artificial Sequence
  Description of Artificial Sequence: Synthetic oligonucleotide
  Target: SCNA; (+) strand; PAM type: YTN; PAM sequence: TTC
tttatttcaattcagtgcca

SEQ ID NO: 80418 - DNA, 20 bp, Artificial Sequence
  Description of Artificial Sequence: Synthetic oligonucleotide
  Target: SCNA; (+) strand; PAM type: YTN; PAM sequence: CTT
tatttcaattcagtgccaat

SEQ ID NO: 80419 - DNA, 20 bp, Artificial Sequence
  Description of Artificial Sequence: Synthetic oligonucleotide
  Target: SCNA; (+) strand; PAM type: YTN; PAM sequence: TTT
atttcaattcagtgccaatc

SEQ ID NO: 80420 - DNA, 20 bp, Artificial Sequence
  Description of Artificial Sequence: Synthetic oligonucleotide
  Target: SCNA; (+) strand; PAM type: YTN; PAM sequence: TTA
tttcaattcagtgccaatcc

SEQ ID NO: 80421 - DNA, 20 bp, Artificial Sequence
  Description of Artificial Sequence: Synthetic oligonucleotide
  Target: SCNA; (+) strand; PAM type: YTN; PAM sequence: TTT
caattcagtgccaatccttt

SEQ ID NO: 80422 - DNA, 20 bp, Artificial Sequence
  Description of Artificial Sequence: Synthetic oligonucleotide
  Target: SCNA; (+) strand; PAM type: YTN; PAM sequence: TTC
aattcagtgccaatcctttg

SEQ ID NO: 80423 - DNA, 20 bp, Artificial Sequence
  Description of Artificial Sequence: Synthetic oligonucleotide
  Target: SCNA; (+) strand; PAM type: YTN; PAM sequence: TTC
agtgccaatcctttgatctc

SEQ ID NO: 80424 - DNA, 20 bp, Artificial Sequence
  Description of Artificial Sequence: Synthetic oligonucleotide
  Target: SCNA; (+) strand; PAM type: YTN; PAM sequence: CTT
tgatctcactcagcaagtta

SEQ ID NO: 80425 - DNA, 20 bp, Artificial Sequence
  Description of Artificial Sequence: Synthetic oligonucleotide
  Target: SCNA; (+) strand; PAM type: YTN; PAM sequence: TTT
gatctcactcagcaagttaa

SEQ ID NO: 80426 - DNA, 20 bp, Artificial Sequence
  Description of Artificial Sequence: Synthetic oligonucleotide
  Target: SCNA; (+) strand; PAM type: YTN; PAM sequence: TTG
atctcactcagcaagttaat

SEQ ID NO: 80427 - DNA, 20 bp, Artificial Sequence
  Description of Artificial Sequence: Synthetic oligonucleotide
  Target: SCNA; (+) strand; PAM type: YTN; PAM sequence: CTC
actcagcaagttaatttcca

SEQ ID NO: 80428 - DNA, 20 bp, Artificial Sequence
  Description of Artificial Sequence: Synthetic oligonucleotide
  Target: SCNA; (+) strand; PAM type: YTN; PAM sequence: CTC
agcaagttaatttccaccac

SEQ ID NO: 80429 - DNA, 20 bp, Artificial Sequence
  Description of Artificial Sequence: Synthetic oligonucleotide
  Target: SCNA; (+) strand; PAM type: YTN; PAM sequence: TTA
atttccaccacaccttctaa

SEQ ID NO: 80430 - DNA, 20 bp, Artificial Sequence
  Description of Artificial Sequence: Synthetic oligonucleotide
  Target: SCNA; (+) strand; PAM type: YTN; PAM sequence: TTT
ccaccacaccttctaagcaa

SEQ ID NO: 80431 - DNA, 20 bp, Artificial Sequence
  Description of Artificial Sequence: Synthetic oligonucleotide
  Target: SCNA; (+) strand; PAM type: YTN; PAM sequence: TTC
caccacaccttctaagcaac

SEQ ID NO: 80432 - DNA, 20 bp, Artificial Sequence
  Description of Artificial Sequence: Synthetic oligonucleotide
  Target: SCNA; (+) strand; PAM type: YTN; PAM sequence: CTT
ctaagcaacacaatacatac

SEQ ID NO: 80433 - DNA, 20 bp, Artificial Sequence
  Description of Artificial Sequence: Synthetic oligonucleotide
  Target: SCNA; (+) strand; PAM type: YTN; PAM sequence: TTC
taagcaacacaatacatact

SEQ ID NO: 80434 - DNA, 20 bp, Artificial Sequence
  Description of Artificial Sequence: Synthetic oligonucleotide
  Target: SCNA; (+) strand; PAM type: YTN; PAM sequence: CTA
agcaacacaatacatacttc

SEQ ID NO: 80435 - DNA, 20 bp, Artificial Sequence
  Description of Artificial Sequence: Synthetic oligonucleotide
  Target: SCNA; (+) strand; PAM type: YTN; PAM sequence: CTT
ctatttatttatttatttga

SEQ ID NO: 80436 - DNA, 20 bp, Artificial Sequence
  Description of Artificial Sequence: Synthetic oligonucleotide
  Target: SCNA; (+) strand; PAM type: YTN; PAM sequence: TTC
tatttatttatttatttgag

SEQ ID NO: 80437 - DNA, 20 bp, Artificial Sequence
  Description of Artificial Sequence: Synthetic oligonucleotide
  Target: SCNA; (+) strand; PAM type: YTN; PAM sequence: CTA
tttatttatttatttgagat

SEQ ID NO: 80438 - DNA, 20 bp, Artificial Sequence
  Description of Artificial Sequence: Synthetic oligonucleotide
  Target: SCNA; (+) strand; PAM type: YTN; PAM sequence: TTT
atttatttatttgagatgga

SEQ ID NO: 80439 - DNA, 20 bp, Artificial Sequence
  Description of Artificial Sequence: Synthetic oligonucleotide
  Target: SCNA; (+) strand; PAM type: YTN; PAM sequence: TTA
tttatttatttgagatggag

SEQ ID NO: 80440 - DNA, 20 bp, Artificial Sequence
  Description of Artificial Sequence: Synthetic oligonucleotide
  Target: SCNA; (+) strand; PAM type: YTN; PAM sequence: TTT
atttatttgagatggagttt

SEQ ID NO: 80441 - DNA, 20 bp, Artificial Sequence
  Description of Artificial Sequence: Synthetic oligonucleotide
  Target: SCNA; (+) strand; PAM type: YTN; PAM sequence: TTA
tttatttgagatggagtttc

SEQ ID NO: 80442 - DNA, 20 bp, Artificial Sequence
  Description of Artificial Sequence: Synthetic oligonucleotide
  Target: SCNA; (+) strand; PAM type: YTN; PAM sequence: TTT
atttgagatggagtttcatt

SEQ ID NO: 80443 - DNA, 20 bp, Artificial Sequence
  Description of Artificial Sequence: Synthetic oligonucleotide
  Target: SCNA; (+) strand; PAM type: YTN; PAM sequence: TTA
tttgagatggagtttcattc

SEQ ID NO: 80444 - DNA, 20 bp, Artificial Sequence
  Description of Artificial Sequence: Synthetic oligonucleotide
  Target: SCNA; (+) strand; PAM type: YTN; PAM sequence: TTT
gagatggagtttcattcttg

SEQ ID NO: 80445 - DNA, 20 bp, Artificial Sequence
  Description of Artificial Sequence: Synthetic oligonucleotide
  Target: SCNA; (+) strand; PAM type: YTN; PAM sequence: TTG
agatggagtttcattcttgt

SEQ ID NO: 80446 - DNA, 20 bp, Artificial Sequence
  Description of Artificial Sequence: Synthetic oligonucleotide
  Target: SCNA; (+) strand; PAM type: YTN; PAM sequence: TTT
cattcttgttgttcaggctg

SEQ ID NO: 80447 - DNA, 20 bp, Artificial Sequence
  Description of Artificial Sequence: Synthetic oligonucleotide
  Target: SCNA; (+) strand; PAM type: YTN; PAM sequence: TTC
attcttgttgttcaggctgg

SEQ ID NO: 80448 - DNA, 20 bp, Artificial Sequence
  Description of Artificial Sequence: Synthetic oligonucleotide
  Target: SCNA; (+) strand; PAM type: YTN; PAM sequence: TTC
ttgttgttcaggctggaatg

SEQ ID NO: 80449 - DNA, 20 bp, Artificial Sequence
  Description of Artificial Sequence: Synthetic oligonucleotide
  Target: SCNA; (+) strand; PAM type: YTN; PAM sequence: CTT
gttgttcaggctggaatgca

SEQ ID NO: 80450 - DNA, 20 bp, Artificial Sequence
  Description of Artificial Sequence: Synthetic oligonucleotide
  Target: SCNA; (+) strand; PAM type: YTN; PAM sequence: TTG
ttgttcaggctggaatgcaa

SEQ ID NO: 80451 - DNA, 20 bp, Artificial Sequence
  Description of Artificial Sequence: Synthetic oligonucleotide
  Target: SCNA; (+) strand; PAM type: YTN; PAM sequence: TTG
ttcaggctggaatgcaatgg

SEQ ID NO: 80452 - DNA, 20 bp, Artificial Sequence
  Description of Artificial Sequence: Synthetic oligonucleotide
  Target: SCNA; (+) strand; PAM type: YTN; PAM sequence: TTC
aggctggaatgcaatggcac

SEQ ID NO: 80453 - DNA, 20 bp, Artificial Sequence
  Description of Artificial Sequence: Synthetic oligonucleotide
  Target: SCNA; (+) strand; PAM type: YTN; PAM sequence: CTG
gaatgcaatggcacaatctc

SEQ ID NO: 80454 - DNA, 20 bp, Artificial Sequence
  Description of Artificial Sequence: Synthetic oligonucleotide
  Target: SCNA; (+) strand; PAM type: YTN; PAM sequence: CTC
agctcacagcaacctccgcc

SEQ ID NO: 80455 - DNA, 20 bp, Artificial Sequence
  Description of Artificial Sequence: Synthetic oligonucleotide
  Target: SCNA; (+) strand; PAM type: YTN; PAM sequence: CTC
acagcaacctccgcctcctg

SEQ ID NO: 80456 - DNA, 20 bp, Artificial Sequence
  Description of Artificial Sequence: Synthetic oligonucleotide
  Target: SCNA; (+) strand; PAM type: YTN; PAM sequence: CTC
cgcctcctgagttcaagcta

SEQ ID NO: 80457 - DNA, 20 bp, Artificial Sequence
  Description of Artificial Sequence: Synthetic oligonucleotide
  Target: SCNA; (+) strand; PAM type: YTN; PAM sequence: CTC
ctgagttcaagctattctcc

SEQ ID NO: 80458 - DNA, 20 bp, Artificial Sequence
  Description of Artificial Sequence: Synthetic oligonucleotide
  Target: SCNA; (+) strand; PAM type: YTN; PAM sequence: CTG
agttcaagctattctcctgc

SEQ ID NO: 80459 - DNA, 20 bp, Artificial Sequence
  Description of Artificial Sequence: Synthetic oligonucleotide
  Target: SCNA; (+) strand; PAM type: YTN; PAM sequence: TTC
aagctattctcctgcctcag

SEQ ID NO: 80460 - DNA, 20 bp, Artificial Sequence
  Description of Artificial Sequence: Synthetic oligonucleotide
  Target: SCNA; (+) strand; PAM type: YTN; PAM sequence: CTA
ttctcctgcctcagtctccc

SEQ ID NO: 80461 - DNA, 20 bp, Artificial Sequence
  Description of Artificial Sequence: Synthetic oligonucleotide
  Target: SCNA; (+) strand; PAM type: YTN; PAM sequence: TTC
tcctgcctcagtctcccgag

SEQ ID NO: 80462 - DNA, 20 bp, Artificial Sequence
  Description of Artificial Sequence: Synthetic oligonucleotide
  Target: SCNA; (+) strand; PAM type: YTN; PAM sequence: CTC
ctgcctcagtctcccgagta

SEQ ID NO: 80463 - DNA, 20 bp, Artificial Sequence
  Description of Artificial Sequence: Synthetic oligonucleotide
  Target: SCNA; (+) strand; PAM type: YTN; PAM sequence: CTG
cctcagtctcccgagtagct

SEQ ID NO: 80464 - DNA, 20 bp, Artificial Sequence
  Description of Artificial Sequence: Synthetic oligonucleotide
  Target: SCNA; (+) strand; PAM type: YTN; PAM sequence: CTC
agtctcccgagtagctggga

SEQ ID NO: 80465 - DNA, 20 bp, Artificial Sequence
  Description of Artificial Sequence: Synthetic oligonucleotide
  Target: SCNA; (+) strand; PAM type: YTN; PAM sequence: CTC
ccgagtagctgggattacag

SEQ ID NO: 80466 - DNA, 20 bp, Artificial Sequence
  Description of Artificial Sequence: Synthetic oligonucleotide
  Target: SCNA; (+) strand; PAM type: YTN; PAM sequence: CTG
ggattacaggtgcccacaac

SEQ ID NO: 80467 - DNA, 20 bp, Artificial Sequence
  Description of Artificial Sequence: Synthetic oligonucleotide
  Target: SCNA; (+) strand; PAM type: YTN; PAM sequence: TTA
caggtgcccacaaccacacc

SEQ ID NO: 80468 - DNA, 20 bp, Artificial Sequence
  Description of Artificial Sequence: Synthetic oligonucleotide
  Target: SCNA; (+) strand; PAM type: YTN; PAM sequence: CTG
gctaattattattattatta

SEQ ID NO: 80469 - DNA, 20 bp, Artificial Sequence
  Description of Artificial Sequence: Synthetic oligonucleotide
  Target: SCNA; (+) strand; PAM type: YTN; PAM sequence: CTA
attattattattattattat

SEQ ID NO: 80470 - DNA, 20 bp, Artificial Sequence
  Description of Artificial Sequence: Synthetic oligonucleotide
  Target: SCNA; (+) strand; PAM type: YTN; PAM sequence: TTA
ttattattattattatttgt

SEQ ID NO: 80471 - DNA, 20 bp, Artificial Sequence
  Description of Artificial Sequence: Synthetic oligonucleotide
  Target: SCNA; (+) strand; PAM type: YTN; PAM sequence: TTA
ttattattattatttgtatt

SEQ ID NO: 80472 - DNA, 20 bp, Artificial Sequence
  Description of Artificial Sequence: Synthetic oligonucleotide
  Target: SCNA; (+) strand; PAM type: YTN; PAM sequence: TTA
ttattattatttgtattttt

SEQ ID NO: 80473 - DNA, 20 bp, Artificial Sequence
  Description of Artificial Sequence: Synthetic oligonucleotide
  Target: SCNA; (+) strand; PAM type: YTN; PAM sequence: TTA
ttattatttgtatttttagt

SEQ ID NO: 80474 - DNA, 20 bp, Artificial Sequence
  Description of Artificial Sequence: Synthetic oligonucleotide
  Target: SCNA; (+) strand; PAM type: YTN; PAM sequence: TTA
ttatttgtatttttagtaga

SEQ ID NO: 80475 - DNA, 20 bp, Artificial Sequence
  Description of Artificial Sequence: Synthetic oligonucleotide
  Target: SCNA; (+) strand; PAM type: YTN; PAM sequence: TTA
tttgtatttttagtagaaac

SEQ ID NO: 80476 - DNA, 20 bp, Artificial Sequence
  Description of Artificial Sequence: Synthetic oligonucleotide
  Target: SCNA; (+) strand; PAM type: YTN; PAM sequence: TTT
gtatttttagtagaaacagg

SEQ ID NO: 80477 - DNA, 20 bp, Artificial Sequence
  Description of Artificial Sequence: Synthetic oligonucleotide
  Target: SCNA; (+) strand; PAM type: YTN; PAM sequence: TTG
tatttttagtagaaacaggg

SEQ ID NO: 80478 - DNA, 20 bp, Artificial Sequence
  Description of Artificial Sequence: Synthetic oligonucleotide
  Target: SCNA; (+) strand; PAM type: YTN; PAM sequence: TTT
ttagtagaaacagggtttca

SEQ ID NO: 80479 - DNA, 20 bp, Artificial Sequence
  Description of Artificial Sequence: Synthetic oligonucleotide
  Target: SCNA; (+) strand; PAM type: YTN; PAM sequence: TTT
tagtagaaacagggtttcat

SEQ ID NO: 80480 - DNA, 20 bp, Artificial Sequence
  Description of Artificial Sequence: Synthetic oligonucleotide
  Target: SCNA; (+) strand; PAM type: YTN; PAM sequence: TTT
agtagaaacagggtttcatc

SEQ ID NO: 80481 - DNA, 20 bp, Artificial Sequence
  Description of Artificial Sequence: Synthetic oligonucleotide
  Target: SCNA; (+) strand; PAM type: YTN; PAM sequence: TTA
gtagaaacagggtttcatca

SEQ ID NO: 80482 - DNA, 20 bp, Artificial Sequence
  Description of Artificial Sequence: Synthetic oligonucleotide
  Target: SCNA; (+) strand; PAM type: YTN; PAM sequence: TTT
catcatgttggccaggccgg

SEQ ID NO: 80483 - DNA, 20 bp, Artificial Sequence
  Description of Artificial Sequence: Synthetic oligonucleotide
  Target: SCNA; (+) strand; PAM type: YTN; PAM sequence: TTC
atcatgttggccaggccggt

SEQ ID NO: 80484 - DNA, 20 bp, Artificial Sequence
  Description of Artificial Sequence: Synthetic oligonucleotide
  Target: SCNA; (+) strand; PAM type: YTN; PAM sequence: TTG
gccaggccggtctcgaactc

SEQ ID NO: 80485 - DNA, 20 bp, Artificial Sequence
  Description of Artificial Sequence: Synthetic oligonucleotide
  Target: SCNA; (+) strand; PAM type: YTN; PAM sequence: CTC
gaactcctaacctcaggtga

SEQ ID NO: 80486 - DNA, 20 bp, Artificial Sequence
  Description of Artificial Sequence: Synthetic oligonucleotide
  Target: SCNA; (+) strand; PAM type: YTN; PAM sequence: CTC
ctaacctcaggtgatccacc

SEQ ID NO: 80487 - DNA, 20 bp, Artificial Sequence
  Description of Artificial Sequence: Synthetic oligonucleotide
  Target: SCNA; (+) strand; PAM type: YTN; PAM sequence: CTA
acctcaggtgatccacccgc

SEQ ID NO: 80488 - DNA, 20 bp, Artificial Sequence
  Description of Artificial Sequence: Synthetic oligonucleotide
  Target: SCNA; (+) strand; PAM type: YTN; PAM sequence: CTC
aggtgatccacccgccttag

SEQ ID NO: 80489 - DNA, 20 bp, Artificial Sequence
  Description of Artificial Sequence: Synthetic oligonucleotide
  Target: SCNA; (+) strand; PAM type: YTN; PAM sequence: CTT
agcctcccaaagtgctagga

SEQ ID NO: 80490 - DNA, 20 bp, Artificial Sequence
  Description of Artificial Sequence: Synthetic oligonucleotide
  Target: SCNA; (+) strand; PAM type: YTN; PAM sequence: TTA
gcctcccaaagtgctaggat

SEQ ID NO: 80491 - DNA, 20 bp, Artificial Sequence
  Description of Artificial Sequence: Synthetic oligonucleotide
  Target: SCNA; (+) strand; PAM type: YTN; PAM sequence: CTC
ccaaagtgctaggattatag

SEQ ID NO: 80492 - DNA, 20 bp, Artificial Sequence
  Description of Artificial Sequence: Synthetic oligonucleotide
  Target: SCNA; (+) strand; PAM type: YTN; PAM sequence: CTA
ggattataggcatgatccac

SEQ ID NO: 80493 - DNA, 20 bp, Artificial Sequence
  Description of Artificial Sequence: Synthetic oligonucleotide
  Target: SCNA; (+) strand; PAM type: YTN; PAM sequence: TTA
taggcatgatccaccgcacc

SEQ ID NO: 80494 - DNA, 20 bp, Artificial Sequence
  Description of Artificial Sequence: Synthetic oligonucleotide
  Target: SCNA; (+) strand; PAM type: YTN; PAM sequence: CTA
cttattatctacgtgttcag

SEQ ID NO: 80495 - DNA, 20 bp, Artificial Sequence
  Description of Artificial Sequence: Synthetic oligonucleotide
  Target: SCNA; (+) strand; PAM type: YTN; PAM sequence: CTT
attatctacgtgttcagacg

SEQ ID NO: 80496 - DNA, 20 bp, Artificial Sequence
  Description of Artificial Sequence: Synthetic oligonucleotide
  Target: SCNA; (+) strand; PAM type: YTN; PAM sequence: TTA
ttatctacgtgttcagacgt

SEQ ID NO: 80497 - DNA, 20 bp, Artificial Sequence
  Description of Artificial Sequence: Synthetic oligonucleotide
  Target: SCNA; (+) strand; PAM type: YTN; PAM sequence: TTA
tctacgtgttcagacgtggt

SEQ ID NO: 80498 - DNA, 20 bp, Artificial Sequence
  Description of Artificial Sequence: Synthetic oligonucleotide
  Target: SCNA; (+) strand; PAM type: YTN; PAM sequence: CTA
cgtgttcagacgtggtatta

SEQ ID NO: 80499 - DNA, 20 bp, Artificial Sequence
  Description of Artificial Sequence: Synthetic oligonucleotide
  Target: SCNA; (+) strand; PAM type: YTN; PAM sequence: TTC
agacgtggtattatcacata

SEQ ID NO: 80500 - DNA, 20 bp, Artificial Sequence
  Description of Artificial Sequence: Synthetic oligonucleotide
  Target: SCNA; (+) strand; PAM type: YTN; PAM sequence: TTA
tcacatatgtacgaataaca

SEQ ID NO: 80501 - DNA, 20 bp, Artificial Sequence
  Description of Artificial Sequence: Synthetic oligonucleotide
  Target: SCNA; (+) strand; PAM type: YTN; PAM sequence: TTG
tgaaggaacttggatctttt

SEQ ID NO: 80502 - DNA, 20 bp, Artificial Sequence
  Description of Artificial Sequence: Synthetic oligonucleotide
  Target: SCNA; (+) strand; PAM type: YTN; PAM sequence: CTT
ggatctttttatagaacttc

SEQ ID NO: 80503 - DNA, 20 bp, Artificial Sequence
  Description of Artificial Sequence: Synthetic oligonucleotide
  Target: SCNA; (+) strand; PAM type: YTN; PAM sequence: TTG
gatctttttatagaacttca

SEQ ID NO: 80504 - DNA, 20 bp, Artificial Sequence
  Description of Artificial Sequence: Synthetic oligonucleotide
  Target: SCNA; (+) strand; PAM type: YTN; PAM sequence: CTT
tttatagaacttcaggtagt

SEQ ID NO: 80505 - DNA, 20 bp, Artificial Sequence
  Description of Artificial Sequence: Synthetic oligonucleotide
  Target: SCNA; (+) strand; PAM type: YTN; PAM sequence: TTT
ttatagaacttcaggtagtg

SEQ ID NO: 80506 - DNA, 20 bp, Artificial Sequence
  Description of Artificial Sequence: Synthetic oligonucleotide
  Target: SCNA; (+) strand; PAM type: YTN; PAM sequence: TTT
tatagaacttcaggtagtga

SEQ ID NO: 80507 - DNA, 20 bp, Artificial Sequence
  Description of Artificial Sequence: Synthetic oligonucleotide
  Target: SCNA; (+) strand; PAM type: YTN; PAM sequence: TTT
atagaacttcaggtagtgaa

SEQ ID NO: 80508 - DNA, 20 bp, Artificial Sequence
  Description of Artificial Sequence: Synthetic oligonucleotide
  Target: SCNA; (+) strand; PAM type: YTN; PAM sequence: TTA
tagaacttcaggtagtgaaa

SEQ ID NO: 80509 - DNA, 20 bp, Artificial Sequence
  Description of Artificial Sequence: Synthetic oligonucleotide
  Target: SCNA; (+) strand; PAM type: YTN; PAM sequence: CTT
caggtagtgaaacaaagggt

SEQ ID NO: 80510 - DNA, 20 bp, Artificial Sequence
  Description of Artificial Sequence: Synthetic oligonucleotide
  Target: SCNA; (+) strand; PAM type: YTN; PAM sequence: TTC
aggtagtgaaacaaagggtt

SEQ ID NO: 80511 - DNA, 20 bp, Artificial Sequence
  Description of Artificial Sequence: Synthetic oligonucleotide
  Target: SCNA; (+) strand; PAM type: YTN; PAM sequence: TTC
ttaaaaagctaaatttgcag

SEQ ID NO: 80512 - DNA, 20 bp, Artificial Sequence
  Description of Artificial Sequence: Synthetic oligonucleotide
  Target: SCNA; (+) strand; PAM type: YTN; PAM sequence: CTT
aaaaagctaaatttgcagta

SEQ ID NO: 80513 - DNA, 20 bp, Artificial Sequence
  Description of Artificial Sequence: Synthetic oligonucleotide
  Target: SCNA; (+) strand; PAM type: YTN; PAM sequence: TTA
aaaagctaaatttgcagtaa

SEQ ID NO: 80514 - DNA, 20 bp, Artificial Sequence
  Description of Artificial Sequence: Synthetic oligonucleotide
  Target: SCNA; (+) strand; PAM type: YTN; PAM sequence: CTA
aatttgcagtaattttaata

SEQ ID NO: 80515 - DNA, 20 bp, Artificial Sequence
  Description of Artificial Sequence: Synthetic oligonucleotide
  Target: SCNA; (+) strand; PAM type: YTN; PAM sequence: TTT
gcagtaattttaataggagc

SEQ ID NO: 80516 - DNA, 20 bp, Artificial Sequence
  Description of Artificial Sequence: Synthetic oligonucleotide
  Target: SCNA; (+) strand; PAM type: YTN; PAM sequence: TTG
cagtaattttaataggagca

SEQ ID NO: 80517 - DNA, 20 bp, Artificial Sequence
  Description of Artificial Sequence: Synthetic oligonucleotide
  Target: SCNA; (+) strand; PAM type: YTN; PAM sequence: TTT
taataggagcacaggagcta

SEQ ID NO: 80518 - DNA, 20 bp, Artificial Sequence
  Description of Artificial Sequence: Synthetic oligonucleotide
  Target: SCNA; (+) strand; PAM type: YTN; PAM sequence: TTT
aataggagcacaggagctag

SEQ ID NO: 80519 - DNA, 20 bp, Artificial Sequence
  Description of Artificial Sequence: Synthetic oligonucleotide
  Target: SCNA; (+) strand; PAM type: YTN; PAM sequence: TTA
ataggagcacaggagctaga

SEQ ID NO: 80520 - DNA, 20 bp, Artificial Sequence
  Description of Artificial Sequence: Synthetic oligonucleotide
  Target: SCNA; (+) strand; PAM type: YTN; PAM sequence: CTA
gacagtatgaaaatgaagag

SEQ ID NO: 80521 - DNA, 20 bp, Artificial Sequence
  Description of Artificial Sequence: Synthetic oligonucleotide
  Target: SCNA; (+) strand; PAM type: YTN; PAM sequence: CTA
ttgagcacccttacaatttc

SEQ ID NO: 80522 - DNA, 20 bp, Artificial Sequence
  Description of Artificial Sequence: Synthetic oligonucleotide
  Target: SCNA; (+) strand; PAM type: YTN; PAM sequence: TTG
agcacccttacaatttcttt

SEQ ID NO: 80523 - DNA, 20 bp, Artificial Sequence
  Description of Artificial Sequence: Synthetic oligonucleotide
  Target: SCNA; (+) strand; PAM type: YTN; PAM sequence: CTT
acaatttcttttcataaaac

SEQ ID NO: 80524 - DNA, 20 bp, Artificial Sequence
  Description of Artificial Sequence: Synthetic oligonucleotide
  Target: SCNA; (+) strand; PAM type: YTN; PAM sequence: TTA
caatttcttttcataaaaca

SEQ ID NO: 80525 - DNA, 20 bp, Artificial Sequence
  Description of Artificial Sequence: Synthetic oligonucleotide
  Target: SCNA; (+) strand; PAM type: YTN; PAM sequence: TTT
cttttcataaaacaaaatga

SEQ ID NO: 80526 - DNA, 20 bp, Artificial Sequence
  Description of Artificial Sequence: Synthetic oligonucleotide
  Target: SCNA; (+) strand; PAM type: YTN; PAM sequence: TTC
ttttcataaaacaaaatgag

SEQ ID NO: 80527 - DNA, 20 bp, Artificial Sequence
  Description of Artificial Sequence: Synthetic oligonucleotide
  Target: SCNA; (+) strand; PAM type: YTN; PAM sequence: CTT
ttcataaaacaaaatgagat

SEQ ID NO: 80528 - DNA, 20 bp, Artificial Sequence
  Description of Artificial Sequence: Synthetic oligonucleotide
  Target: SCNA; (+) strand; PAM type: YTN; PAM sequence: TTT
tcataaaacaaaatgagata

SEQ ID NO: 80529 - DNA, 20 bp, Artificial Sequence
  Description of Artificial Sequence: Synthetic oligonucleotide
  Target: SCNA; (+) strand; PAM type: YTN; PAM sequence: TTT
cataaaacaaaatgagatac

SEQ ID NO: 80530 - DNA, 20 bp, Artificial Sequence
  Description of Artificial Sequence: Synthetic oligonucleotide
  Target: SCNA; (+) strand; PAM type: YTN; PAM sequence: TTC
ataaaacaaaatgagatacg

SEQ ID NO: 80531 - DNA, 20 bp, Artificial Sequence
  Description of Artificial Sequence: Synthetic oligonucleotide
  Target: SCNA; (+) strand; PAM type: YTN; PAM sequence: TTC
agtagatttattaaaataag

SEQ ID NO: 80532 - DNA, 20 bp, Artificial Sequence
  Description of Artificial Sequence: Synthetic oligonucleotide
  Target: SCNA; (+) strand; PAM type: YTN; PAM sequence: TTT
attaaaataagttaacattt

SEQ ID NO: 80533 - DNA, 20 bp, Artificial Sequence
  Description of Artificial Sequence: Synthetic oligonucleotide
  Target: SCNA; (+) strand; PAM type: YTN; PAM sequence: TTA
ttaaaataagttaacatttt

SEQ ID NO: 80534 - DNA, 20 bp, Artificial Sequence
  Description of Artificial Sequence: Synthetic oligonucleotide
  Target: SCNA; (+) strand; PAM type: YTN; PAM sequence: TTA
aaataagttaacatttttga

SEQ ID NO: 80535 - DNA, 20 bp, Artificial Sequence
  Description of Artificial Sequence: Synthetic oligonucleotide
  Target: SCNA; (+) strand; PAM type: YTN; PAM sequence: TTA
acatttttgagaagacagtg

SEQ ID NO: 80536 - DNA, 20 bp, Artificial Sequence
  Description of Artificial Sequence: Synthetic oligonucleotide
  Target: SCNA; (+) strand; PAM type: YTN; PAM sequence: TTT
ttgagaagacagtgtaaata

SEQ ID NO: 80537 - DNA, 20 bp, Artificial Sequence
  Description of Artificial Sequence: Synthetic oligonucleotide
  Target: SCNA; (+) strand; PAM type: YTN; PAM sequence: TTT
tgagaagacagtgtaaatag

SEQ ID NO: 80538 - DNA, 20 bp, Artificial Sequence
  Description of Artificial Sequence: Synthetic oligonucleotide
  Target: SCNA; (+) strand; PAM type: YTN; PAM sequence: TTT
gagaagacagtgtaaatagt

SEQ ID NO: 80539 - DNA, 20 bp, Artificial Sequence
  Description of Artificial Sequence: Synthetic oligonucleotide
  Target: SCNA; (+) strand; PAM type: YTN; PAM sequence: TTG
agaagacagtgtaaatagtt

SEQ ID NO: 80540 - DNA, 20 bp, Artificial Sequence
  Description of Artificial Sequence: Synthetic oligonucleotide
  Target: SCNA; (+) strand; PAM type: YTN; PAM sequence: TTT
gaattgagtttacaagcaga

SEQ ID NO: 80541 - DNA, 20 bp, Artificial Sequence
  Description of Artificial Sequence: Synthetic oligonucleotide
  Target: SCNA; (+) strand; PAM type: YTN; PAM sequence: TTG
aattgagtttacaagcagaa

SEQ ID NO: 80542 - DNA, 20 bp, Artificial Sequence
  Description of Artificial Sequence: Synthetic oligonucleotide
  Target: SCNA; (+) strand; PAM type: YTN; PAM sequence: TTG
agtttacaagcagaagttta

SEQ ID NO: 80543 - DNA, 20 bp, Artificial Sequence
  Description of Artificial Sequence: Synthetic oligonucleotide
  Target: SCNA; (+) strand; PAM type: YTN; PAM sequence: TTT
acaagcagaagtttaatttc

SEQ ID NO: 80544 - DNA, 20 bp, Artificial Sequence
  Description of Artificial Sequence: Synthetic oligonucleotide
  Target: SCNA; (+) strand; PAM type: YTN; PAM sequence: TTA
caagcagaagtttaatttca

SEQ ID NO: 80545 - DNA, 20 bp, Artificial Sequence
  Description of Artificial Sequence: Synthetic oligonucleotide
  Target: SCNA; (+) strand; PAM type: YTN; PAM sequence: TTT
aatttcatgtcaaaaacttt

SEQ ID NO: 80546 - DNA, 20 bp, Artificial Sequence
  Description of Artificial Sequence: Synthetic oligonucleotide
  Target: SCNA; (+) strand; PAM type: YTN; PAM sequence: TTA
atttcatgtcaaaaactttc

SEQ ID NO: 80547 - DNA, 20 bp, Artificial Sequence
  Description of Artificial Sequence: Synthetic oligonucleotide
  Target: SCNA; (+) strand; PAM type: YTN; PAM sequence: TTT
catgtcaaaaactttcttgt

SEQ ID NO: 80548 - DNA, 20 bp, Artificial Sequence
  Description of Artificial Sequence: Synthetic oligonucleotide
  Target: SCNA; (+) strand; PAM type: YTN; PAM sequence: TTC
atgtcaaaaactttcttgtt

SEQ ID NO: 80549 - DNA, 20 bp, Artificial Sequence
  Description of Artificial Sequence: Synthetic oligonucleotide
  Target: SCNA; (+) strand; PAM type: YTN; PAM sequence: CTT
tcttgttcagttaaataagc

SEQ ID NO: 80550 - DNA, 20 bp, Artificial Sequence
  Description of Artificial Sequence: Synthetic oligonucleotide
  Target: SCNA; (+) strand; PAM type: YTN; PAM sequence: TTT
cttgttcagttaaataagcc

SEQ ID NO: 80551 - DNA, 20 bp, Artificial Sequence
  Description of Artificial Sequence: Synthetic oligonucleotide
  Target: SCNA; (+) strand; PAM type: YTN; PAM sequence: TTC
ttgttcagttaaataagcca

SEQ ID NO: 80552 - DNA, 20 bp, Artificial Sequence
  Description of Artificial Sequence: Synthetic oligonucleotide
  Target: SCNA; (+) strand; PAM type: YTN; PAM sequence: CTT
gttcagttaaataagccaga

SEQ ID NO: 80553 - DNA, 20 bp, Artificial Sequence
  Description of Artificial Sequence: Synthetic oligonucleotide
  Target: SCNA; (+) strand; PAM type: YTN; PAM sequence: TTG
ttcagttaaataagccagaa

SEQ ID NO: 80554 - DNA, 20 bp, Artificial Sequence
  Description of Artificial Sequence: Synthetic oligonucleotide
  Target: SCNA; (+) strand; PAM type: YTN; PAM sequence: TTC
agttaaataagccagaaaca

SEQ ID NO: 80555 - DNA, 20 bp, Artificial Sequence
  Description of Artificial Sequence: Synthetic oligonucleotide
  Target: SCNA; (+) strand; PAM type: YTN; PAM sequence: TTA
aataagccagaaacagaaag

SEQ ID NO: 80556 - DNA, 20 bp, Artificial Sequence
  Description of Artificial Sequence: Synthetic oligonucleotide
  Target: SCNA; (+) strand; PAM type: YTN; PAM sequence: CTC
actcatgtggaatctaaaga

SEQ ID NO: 80557 - DNA, 20 bp, Artificial Sequence
  Description of Artificial Sequence: Synthetic oligonucleotide
  Target: SCNA; (+) strand; PAM type: YTN; PAM sequence: CTC
atgtggaatctaaagaaaaa

SEQ ID NO: 80558 - DNA, 20 bp, Artificial Sequence
  Description of Artificial Sequence: Synthetic oligonucleotide
  Target: SCNA; (+) strand; PAM type: YTN; PAM sequence: CTA
aagaaaaagaaaagttgata

SEQ ID NO: 80559 - DNA, 20 bp, Artificial Sequence
  Description of Artificial Sequence: Synthetic oligonucleotide
  Target: SCNA; (+) strand; PAM type: YTN; PAM sequence: TTG
atatcatagaagcagagagg

SEQ ID NO: 80560 - DNA, 20 bp, Artificial Sequence
  Description of Artificial Sequence: Synthetic oligonucleotide
  Target: SCNA; (+) strand; PAM type: YTN; PAM sequence: CTC
atctaaggaaatgaaggcac

SEQ ID NO: 80561 - DNA, 20 bp, Artificial Sequence
  Description of Artificial Sequence: Synthetic oligonucleotide
  Target: SCNA; (+) strand; PAM type: YTN; PAM sequence: CTA
aggaaatgaaggcacatttt

SEQ ID NO: 80562 - DNA, 20 bp, Artificial Sequence
  Description of Artificial Sequence: Synthetic oligonucleotide
  Target: SCNA; (+) strand; PAM type: YTN; PAM sequence: TTT
tcttgacatgctttgtactc

SEQ ID NO: 80563 - DNA, 20 bp, Artificial Sequence
  Description of Artificial Sequence: Synthetic oligonucleotide
  Target: SCNA; (+) strand; PAM type: YTN; PAM sequence: TTT
cttgacatgctttgtactcc

SEQ ID NO: 80564 - DNA, 20 bp, Artificial Sequence
  Description of Artificial Sequence: Synthetic oligonucleotide
  Target: SCNA; (+) strand; PAM type: YTN; PAM sequence: TTC
ttgacatgctttgtactccc

SEQ ID NO: 80565 - DNA, 20 bp, Artificial Sequence
  Description of Artificial Sequence: Synthetic oligonucleotide
  Target: SCNA; (+) strand; PAM type: YTN; PAM sequence: CTT
gacatgctttgtactcccca

SEQ ID NO: 80566 - DNA, 20 bp, Artificial Sequence
  Description of Artificial Sequence: Synthetic oligonucleotide
  Target: SCNA; (+) strand; PAM type: YTN; PAM sequence: TTG
acatgctttgtactccccag

SEQ ID NO: 80567 - DNA, 20 bp, Artificial Sequence
  Description of Artificial Sequence: Synthetic oligonucleotide
  Target: SCNA; (+) strand; PAM type: YTN; PAM sequence: CTT
tgtactccccagataagcct

SEQ ID NO: 80568 - DNA, 20 bp, Artificial Sequence
  Description of Artificial Sequence: Synthetic oligonucleotide
  Target: SCNA; (+) strand; PAM type: YTN; PAM sequence: TTT
gtactccccagataagcctc

SEQ ID NO: 80569 - DNA, 20 bp, Artificial Sequence
  Description of Artificial Sequence: Synthetic oligonucleotide
  Target: SCNA; (+) strand; PAM type: YTN; PAM sequence: TTG
tactccccagataagcctca

SEQ ID NO: 80570 - DNA, 20 bp, Artificial Sequence
  Description of Artificial Sequence: Synthetic oligonucleotide
  Target: SCNA; (+) strand; PAM type: YTN; PAM sequence: CTC
cccagataagcctcagtctg

SEQ ID NO: 80571 - DNA, 20 bp, Artificial Sequence
  Description of Artificial Sequence: Synthetic oligonucleotide
  Target: SCNA; (+) strand; PAM type: YTN; PAM sequence: CTC
agtctgagaggagttacacc

SEQ ID NO: 80572 - DNA, 20 bp, Artificial Sequence
  Description of Artificial Sequence: Synthetic oligonucleotide
  Target: SCNA; (+) strand; PAM type: YTN; PAM sequence: CTG
agaggagttacaccatgtca

SEQ ID NO: 80573 - DNA, 20 bp, Artificial Sequence
  Description of Artificial Sequence: Synthetic oligonucleotide
  Target: SCNA; (+) strand; PAM type: YTN; PAM sequence: TTA
caccatgtcagctgtttagt

SEQ ID NO: 80574 - DNA, 20 bp, Artificial Sequence
  Description of Artificial Sequence: Synthetic oligonucleotide
  Target: SCNA; (+) strand; PAM type: YTN; PAM sequence: CTG
tttagtgctattcacatgac

SEQ ID NO: 80575 - DNA, 20 bp, Artificial Sequence
  Description of Artificial Sequence: Synthetic oligonucleotide
  Target: SCNA; (+) strand; PAM type: YTN; PAM sequence: TTT
agtgctattcacatgactat

SEQ ID NO: 80576 - DNA, 20 bp, Artificial Sequence
  Description of Artificial Sequence: Synthetic oligonucleotide
  Target: SCNA; (+) strand; PAM type: YTN; PAM sequence: TTA
gtgctattcacatgactatt

SEQ ID NO: 80577 - DNA, 20 bp, Artificial Sequence
  Description of Artificial Sequence: Synthetic oligonucleotide
  Target: SCNA; (+) strand; PAM type: YTN; PAM sequence: CTA
ttcacatgactattgtatag

SEQ ID NO: 80578 - DNA, 20 bp, Artificial Sequence
  Description of Artificial Sequence: Synthetic oligonucleotide
  Target: SCNA; (+) strand; PAM type: YTN; PAM sequence: TTC
acatgactattgtataggtt

SEQ ID NO: 80579 - DNA, 20 bp, Artificial Sequence
  Description of Artificial Sequence: Synthetic oligonucleotide
  Target: SCNA; (+) strand; PAM type: YTN; PAM sequence: CTA
ttgtataggtttcatctcac

SEQ ID NO: 80580 - DNA, 20 bp, Artificial Sequence
  Description of Artificial Sequence: Synthetic oligonucleotide
  Target: SCNA; (+) strand; PAM type: YTN; PAM sequence: TTG
tataggtttcatctcaccag

SEQ ID NO: 80581 - DNA, 20 bp, Artificial Sequence
  Description of Artificial Sequence: Synthetic oligonucleotide
  Target: SCNA; (+) strand; PAM type: YTN; PAM sequence: TTT
catctcaccagttgaagaag

SEQ ID NO: 80582 - DNA, 20 bp, Artificial Sequence
  Description of Artificial Sequence: Synthetic oligonucleotide
  Target: SCNA; (+) strand; PAM type: YTN; PAM sequence: TTC
atctcaccagttgaagaagc

SEQ ID NO: 80583 - DNA, 20 bp, Artificial Sequence
  Description of Artificial Sequence: Synthetic oligonucleotide
  Target: SCNA; (+) strand; PAM type: YTN; PAM sequence: CTC
accagttgaagaagccaata

SEQ ID NO: 80584 - DNA, 20 bp, Artificial Sequence
  Description of Artificial Sequence: Synthetic oligonucleotide
  Target: SCNA; (+) strand; PAM type: YTN; PAM sequence: TTG
aagaagccaatatttactta

SEQ ID NO: 80585 - DNA, 20 bp, Artificial Sequence
  Description of Artificial Sequence: Synthetic oligonucleotide
  Target: SCNA; (+) strand; PAM type: YTN; PAM sequence: TTT
acttatttatttatttattt

SEQ ID NO: 80586 - DNA, 20 bp, Artificial Sequence
  Description of Artificial Sequence: Synthetic oligonucleotide
  Target: SCNA; (+) strand; PAM type: YTN; PAM sequence: TTA
cttatttatttatttattta

SEQ ID NO: 80587 - DNA, 20 bp, Artificial Sequence
  Description of Artificial Sequence: Synthetic oligonucleotide
  Target: SCNA; (+) strand; PAM type: YTN; PAM sequence: CTT
atttatttatttatttattt

SEQ ID NO: 80588 - DNA, 20 bp, Artificial Sequence
  Description of Artificial Sequence: Synthetic oligonucleotide
  Target: SCNA; (+) strand; PAM type: YTN; PAM sequence: TTA
tttatttatttatttattta

SEQ ID NO: 80589 - DNA, 20 bp, Artificial Sequence
  Description of Artificial Sequence: Synthetic oligonucleotide
  Target: SCNA; (+) strand; PAM type: YTN; PAM sequence: TTT
atttatttatttatttattt

SEQ ID NO: 80590 - DNA, 20 bp, Artificial Sequence
  Description of Artificial Sequence: Synthetic oligonucleotide
  Target: SCNA; (+) strand; PAM type: YTN; PAM sequence: TTA
tttatttatttatttatttt

SEQ ID NO: 80591 - DNA, 20 bp, Artificial Sequence
  Description of Artificial Sequence: Synthetic oligonucleotide
  Target: SCNA; (+) strand; PAM type: YTN; PAM sequence: TTT
atttatttatttattttgag

SEQ ID NO: 80592 - DNA, 20 bp, Artificial Sequence
  Description of Artificial Sequence: Synthetic oligonucleotide
  Target: SCNA; (+) strand; PAM type: YTN; PAM sequence: TTA
tttatttatttattttgaga

SEQ ID NO: 80593 - DNA, 20 bp, Artificial Sequence
  Description of Artificial Sequence: Synthetic oligonucleotide
  Target: SCNA; (+) strand; PAM type: YTN; PAM sequence: TTT
atttatttattttgagacgg

SEQ ID NO: 80594 - DNA, 20 bp, Artificial Sequence
  Description of Artificial Sequence: Synthetic oligonucleotide
  Target: SCNA; (+) strand; PAM type: YTN; PAM sequence: TTA
tttatttattttgagacgga

SEQ ID NO: 80595 - DNA, 20 bp, Artificial Sequence
  Description of Artificial Sequence: Synthetic oligonucleotide
  Target: SCNA; (+) strand; PAM type: YTN; PAM sequence: TTT
atttattttgagacggagtc

SEQ ID NO: 80596 - DNA, 20 bp, Artificial Sequence
  Description of Artificial Sequence: Synthetic oligonucleotide
  Target: SCNA; (+) strand; PAM type: YTN; PAM sequence: TTA
tttattttgagacggagtct

SEQ ID NO: 80597 - DNA, 20 bp, Artificial Sequence
  Description of Artificial Sequence: Synthetic oligonucleotide
  Target: SCNA; (+) strand; PAM type: YTN; PAM sequence: TTT
attttgagacggagtcttgc

SEQ ID NO: 80598 - DNA, 20 bp, Artificial Sequence
  Description of Artificial Sequence: Synthetic oligonucleotide
  Target: SCNA; (+) strand; PAM type: YTN; PAM sequence: TTA
ttttgagacggagtcttgct

SEQ ID NO: 80599 - DNA, 20 bp, Artificial Sequence
  Description of Artificial Sequence: Synthetic oligonucleotide
  Target: SCNA; (+) strand; PAM type: YTN; PAM sequence: TTT
tgagacggagtcttgctctg

SEQ ID NO: 80600 - DNA, 20 bp, Artificial Sequence
  Description of Artificial Sequence: Synthetic oligonucleotide
  Target: SCNA; (+) strand; PAM type: YTN; PAM sequence: TTT
gagacggagtcttgctctgt

SEQ ID NO: 80601 - DNA, 20 bp, Artificial Sequence
  Description of Artificial Sequence: Synthetic oligonucleotide
  Target: SCNA; (+) strand; PAM type: YTN; PAM sequence: TTG
agacggagtcttgctctgtc

SEQ ID NO: 80602 - DNA, 20 bp, Artificial Sequence
  Description of Artificial Sequence: Synthetic oligonucleotide
  Target: SCNA; (+) strand; PAM type: YTN; PAM sequence: CTT
gctctgtcacccaggctgga

SEQ ID NO: 80603 - DNA, 20 bp, Artificial Sequence
  Description of Artificial Sequence: Synthetic oligonucleotide
  Target: SCNA; (+) strand; PAM type: YTN; PAM sequence: TTG
ctctgtcacccaggctggag

SEQ ID NO: 80604 - DNA, 20 bp, Artificial Sequence
  Description of Artificial Sequence: Synthetic oligonucleotide
  Target: SCNA; (+) strand; PAM type: YTN; PAM sequence: CTC
tgtcacccaggctggagtgc

SEQ ID NO: 80605 - DNA, 20 bp, Artificial Sequence
  Description of Artificial Sequence: Synthetic oligonucleotide
  Target: SCNA; (+) strand; PAM type: YTN; PAM sequence: CTG
tcacccaggctggagtgcag

SEQ ID NO: 80606 - DNA, 20 bp, Artificial Sequence
  Description of Artificial Sequence: Synthetic oligonucleotide
  Target: SCNA; (+) strand; PAM type: YTN; PAM sequence: CTG
gagtgcagtggcacgatgtc

SEQ ID NO: 80607 - DNA, 20 bp, Artificial Sequence
  Description of Artificial Sequence: Synthetic oligonucleotide
  Target: SCNA; (+) strand; PAM type: YTN; PAM sequence: CTC
actgcaaactccgactcccg

SEQ ID NO: 80608 - DNA, 20 bp, Artificial Sequence
  Description of Artificial Sequence: Synthetic oligonucleotide
  Target: SCNA; (+) strand; PAM type: YTN; PAM sequence: CTG
caaactccgactcccgggtt

SEQ ID NO: 80609 - DNA, 20 bp, Artificial Sequence
  Description of Artificial Sequence: Synthetic oligonucleotide
  Target: SCNA; (+) strand; PAM type: YTN; PAM sequence: CTC
cgactcccgggttcaggcca

SEQ ID NO: 80610 - DNA, 20 bp, Artificial Sequence
  Description of Artificial Sequence: Synthetic oligonucleotide
  Target: SCNA; (+) strand; PAM type: YTN; PAM sequence: CTC
ccgggttcaggccattctcc

SEQ ID NO: 80611 - DNA, 20 bp, Artificial Sequence
  Description of Artificial Sequence: Synthetic oligonucleotide
  Target: SCNA; (+) strand; PAM type: YTN; PAM sequence: TTC
aggccattctcctgcctcag

SEQ ID NO: 80612 - DNA, 20 bp, Artificial Sequence
  Description of Artificial Sequence: Synthetic oligonucleotide
  Target: SCNA; (+) strand; PAM type: YTN; PAM sequence: TTC
tcctgcctcagcctccccag

SEQ ID NO: 80613 - DNA, 20 bp, Artificial Sequence
  Description of Artificial Sequence: Synthetic oligonucleotide
  Target: SCNA; (+) strand; PAM type: YTN; PAM sequence: CTC
ctgcctcagcctccccagca

SEQ ID NO: 80614 - DNA, 20 bp, Artificial Sequence
  Description of Artificial Sequence: Synthetic oligonucleotide
  Target: SCNA; (+) strand; PAM type: YTN; PAM sequence: CTG
cctcagcctccccagcagct

SEQ ID NO: 80615 - DNA, 20 bp, Artificial Sequence
  Description of Artificial Sequence: Synthetic oligonucleotide
  Target: SCNA; (+) strand; PAM type: YTN; PAM sequence: CTC
agcctccccagcagctggga

SEQ ID NO: 80616 - DNA, 20 bp, Artificial Sequence
  Description of Artificial Sequence: Synthetic oligonucleotide
  Target: SCNA; (+) strand; PAM type: YTN; PAM sequence: CTC
cccagcagctgggactacag

SEQ ID NO: 80617 - DNA, 20 bp, Artificial Sequence
  Description of Artificial Sequence: Synthetic oligonucleotide
  Target: SCNA; (+) strand; PAM type: YTN; PAM sequence: CTG
ggactacaggtgcgcgccac

SEQ ID NO: 80618 - DNA, 20 bp, Artificial Sequence
  Description of Artificial Sequence: Synthetic oligonucleotide
  Target: SCNA; (+) strand; PAM type: YTN; PAM sequence: CTA
caggtgcgcgccaccacacc

SEQ ID NO: 80619 - DNA, 20 bp, Artificial Sequence
  Description of Artificial Sequence: Synthetic oligonucleotide
  Target: SCNA; (+) strand; PAM type: YTN; PAM sequence: CTA
atttttttatatttttagta

SEQ ID NO: 80620 - DNA, 20 bp, Artificial Sequence
  Description of Artificial Sequence: Synthetic oligonucleotide
  Target: SCNA; (+) strand; PAM type: YTN; PAM sequence: TTT
ttttatatttttagtagaga

SEQ ID NO: 80621 - DNA, 20 bp, Artificial Sequence
  Description of Artificial Sequence: Synthetic oligonucleotide
  Target: SCNA; (+) strand; PAM type: YTN; PAM sequence: TTT
tttatatttttagtagagac

SEQ ID NO: 80622 - DNA, 20 bp, Artificial Sequence
  Description of Artificial Sequence: Synthetic oligonucleotide
  Target: SCNA; (+) strand; PAM type: YTN; PAM sequence: TTT
ttatatttttagtagagaca

SEQ ID NO: 80623 - DNA, 20 bp, Artificial Sequence
  Description of Artificial Sequence: Synthetic oligonucleotide
  Target: SCNA; (+) strand; PAM type: YTN; PAM sequence: TTT
tatatttttagtagagacag

SEQ ID NO: 80624 - DNA, 20 bp, Artificial Sequence
  Description of Artificial Sequence: Synthetic oligonucleotide
  Target: SCNA; (+) strand; PAM type: YTN; PAM sequence: TTT
atatttttagtagagacagg

SEQ ID NO: 80625 - DNA, 20 bp, Artificial Sequence
  Description of Artificial Sequence: Synthetic oligonucleotide
  Target: SCNA; (+) strand; PAM type: YTN; PAM sequence: TTA
tatttttagtagagacaggg

SEQ ID NO: 80626 - DNA, 20 bp, Artificial Sequence
  Description of Artificial Sequence: Synthetic oligonucleotide
  Target: SCNA; (+) strand; PAM type: YTN; PAM sequence: TTT
ttagtagagacagggtttca

SEQ ID NO: 80627 - DNA, 20 bp, Artificial Sequence
  Description of Artificial Sequence: Synthetic oligonucleotide
  Target: SCNA; (+) strand; PAM type: YTN; PAM sequence: TTT
tagtagagacagggtttcac

SEQ ID NO: 80628 - DNA, 20 bp, Artificial Sequence
  Description of Artificial Sequence: Synthetic oligonucleotide
  Target: SCNA; (+) strand; PAM type: YTN; PAM sequence: TTT
agtagagacagggtttcacc

SEQ ID NO: 80629 - DNA, 20 bp, Artificial Sequence
  Description of Artificial Sequence: Synthetic oligonucleotide
  Target: SCNA; (+) strand; PAM type: YTN; PAM sequence: TTA
gtagagacagggtttcaccg

SEQ ID NO: 80630 - DNA, 20 bp, Artificial Sequence
  Description of Artificial Sequence: Synthetic oligonucleotide
  Target: SCNA; (+) strand; PAM type: YTN; PAM sequence: TTT
caccgtgttagccaggatgg

SEQ ID NO: 80631 - DNA, 20 bp, Artificial Sequence
  Description of Artificial Sequence: Synthetic oligonucleotide
  Target: SCNA; (+) strand; PAM type: YTN; PAM sequence: TTC
accgtgttagccaggatggt

SEQ ID NO: 80632 - DNA, 20 bp, Artificial Sequence
  Description of Artificial Sequence: Synthetic oligonucleotide
  Target: SCNA; (+) strand; PAM type: YTN; PAM sequence: TTA
gccaggatggtctcgatctc

SEQ ID NO: 80633 - DNA, 20 bp, Artificial Sequence
  Description of Artificial Sequence: Synthetic oligonucleotide
  Target: SCNA; (+) strand; PAM type: YTN; PAM sequence: CTC
gatctcctgacctcgtgatc

SEQ ID NO: 80634 - DNA, 20 bp, Artificial Sequence
  Description of Artificial Sequence: Synthetic oligonucleotide
  Target: SCNA; (+) strand; PAM type: YTN; PAM sequence: CTC
ctgacctcgtgatctgcccg

SEQ ID NO: 80635 - DNA, 20 bp, Artificial Sequence
  Description of Artificial Sequence: Synthetic oligonucleotide
  Target: SCNA; (+) strand; PAM type: YTN; PAM sequence: CTG
acctcgtgatctgcccgcct

SEQ ID NO: 80636 - DNA, 20 bp, Artificial Sequence
  Description of Artificial Sequence: Synthetic oligonucleotide
  Target: SCNA; (+) strand; PAM type: YTN; PAM sequence: CTC
gtgatctgcccgcctcagcc

SEQ ID NO: 80637 - DNA, 20 bp, Artificial Sequence
  Description of Artificial Sequence: Synthetic oligonucleotide
  Target: SCNA; (+) strand; PAM type: YTN; PAM sequence: CTG
cccgcctcagcctcccaaag

SEQ ID NO: 80638 - DNA, 20 bp, Artificial Sequence
  Description of Artificial Sequence: Synthetic oligonucleotide
  Target: SCNA; (+) strand; PAM type: YTN; PAM sequence: CTC
agcctcccaaagtgctggga

SEQ ID NO: 80639 - DNA, 20 bp, Artificial Sequence
  Description of Artificial Sequence: Synthetic oligonucleotide
  Target: SCNA; (+) strand; PAM type: YTN; PAM sequence: CTC
ccaaagtgctgggataacag

SEQ ID NO: 80640 - DNA, 20 bp, Artificial Sequence
  Description of Artificial Sequence: Synthetic oligonucleotide
  Target: SCNA; (+) strand; PAM type: YTN; PAM sequence: CTG
ggataacaggcgtgagccac

SEQ ID NO: 80641 - DNA, 20 bp, Artificial Sequence
  Description of Artificial Sequence: Synthetic oligonucleotide
  Target: SCNA; (+) strand; PAM type: YTN; PAM sequence: CTG
gcctgaagccaatatttaaa

SEQ ID NO: 80642 - DNA, 20 bp, Artificial Sequence
  Description of Artificial Sequence: Synthetic oligonucleotide
  Target: SCNA; (+) strand; PAM type: YTN; PAM sequence: CTG
aagccaatatttaaatggtg

SEQ ID NO: 80643 - DNA, 20 bp, Artificial Sequence
  Description of Artificial Sequence: Synthetic oligonucleotide
  Target: SCNA; (+) strand; PAM type: YTN; PAM sequence: TTT
aaatggtgtggacaaagcaa

SEQ ID NO: 80644 - DNA, 20 bp, Artificial Sequence
  Description of Artificial Sequence: Synthetic oligonucleotide
  Target: SCNA; (+) strand; PAM type: YTN; PAM sequence: TTA
aatggtgtggacaaagcaat

SEQ ID NO: 80645 - DNA, 20 bp, Artificial Sequence
  Description of Artificial Sequence: Synthetic oligonucleotide
  Target: SCNA; (+) strand; PAM type: YTN; PAM sequence: TTT
gttttcaaatagactatgta

SEQ ID NO: 80646 - DNA, 20 bp, Artificial Sequence
  Description of Artificial Sequence: Synthetic oligonucleotide
  Target: SCNA; (+) strand; PAM type: YTN; PAM sequence: TTG
ttttcaaatagactatgtaa

SEQ ID NO: 80647 - DNA, 20 bp, Artificial Sequence
  Description of Artificial Sequence: Synthetic oligonucleotide
  Target: SCNA; (+) strand; PAM type: YTN; PAM sequence: TTT
tcaaatagactatgtaagct

SEQ ID NO: 80648 - DNA, 20 bp, Artificial Sequence
  Description of Artificial Sequence: Synthetic oligonucleotide
  Target: SCNA; (+) strand; PAM type: YTN; PAM sequence: TTT
caaatagactatgtaagcta

SEQ ID NO: 80649 - DNA, 20 bp, Artificial Sequence
  Description of Artificial Sequence: Synthetic oligonucleotide
  Target: SCNA; (+) strand; PAM type: YTN; PAM sequence: TTC
aaatagactatgtaagctaa

SEQ ID NO: 80650 - DNA, 20 bp, Artificial Sequence
  Description of Artificial Sequence: Synthetic oligonucleotide
  Target: SCNA; (+) strand; PAM type: YTN; PAM sequence: CTA
tgtaagctaagggggtctgt

SEQ ID NO: 80651 - DNA, 20 bp, Artificial Sequence
  Description of Artificial Sequence: Synthetic oligonucleotide
  Target: SCNA; (+) strand; PAM type: YTN; PAM sequence: CTA
agggggtctgtaaggacaag

SEQ ID NO: 80652 - DNA, 20 bp, Artificial Sequence
  Description of Artificial Sequence: Synthetic oligonucleotide
  Target: SCNA; (+) strand; PAM type: YTN; PAM sequence: CTG
taaggacaagaggctttctc

SEQ ID NO: 80653 - DNA, 20 bp, Artificial Sequence
  Description of Artificial Sequence: Synthetic oligonucleotide
  Target: SCNA; (+) strand; PAM type: YTN; PAM sequence: CTT
tctccttagtacaggcaatg

SEQ ID NO: 80654 - DNA, 20 bp, Artificial Sequence
  Description of Artificial Sequence: Synthetic oligonucleotide
  Target: SCNA; (+) strand; PAM type: YTN; PAM sequence: TTT
ctccttagtacaggcaatgt

SEQ ID NO: 80655 - DNA, 20 bp, Artificial Sequence
  Description of Artificial Sequence: Synthetic oligonucleotide
  Target: SCNA; (+) strand; PAM type: YTN; PAM sequence: TTC
tccttagtacaggcaatgtg

SEQ ID NO: 80656 - DNA, 20 bp, Artificial Sequence
  Description of Artificial Sequence: Synthetic oligonucleotide
  Target: SCNA; (+) strand; PAM type: YTN; PAM sequence: CTC
cttagtacaggcaatgtggg

SEQ ID NO: 80657 - DNA, 20 bp, Artificial Sequence
  Description of Artificial Sequence: Synthetic oligonucleotide
  Target: SCNA; (+) strand; PAM type: YTN; PAM sequence: CTT
agtacaggcaatgtgggcaa

SEQ ID NO: 80658 - DNA, 20 bp, Artificial Sequence
  Description of Artificial Sequence: Synthetic oligonucleotide
  Target: SCNA; (+) strand; PAM type: YTN; PAM sequence: TTA
gtacaggcaatgtgggcaag

SEQ ID NO: 80659 - DNA, 20 bp, Artificial Sequence
  Description of Artificial Sequence: Synthetic oligonucleotide
  Target: SCNA; (+) strand; PAM type: YTN; PAM sequence: CTG
acatagccacacagcccaag

SEQ ID NO: 80660 - DNA, 20 bp, Artificial Sequence
  Description of Artificial Sequence: Synthetic oligonucleotide
  Target: SCNA; (+) strand; PAM type: YTN; PAM sequence: TTG
ctccctatttgtcttttagg

SEQ ID NO: 80661 - DNA, 20 bp, Artificial Sequence
  Description of Artificial Sequence: Synthetic oligonucleotide
  Target: SCNA; (+) strand; PAM type: YTN; PAM sequence: CTC
cctatttgtcttttaggcta

SEQ ID NO: 80662 - DNA, 20 bp, Artificial Sequence
  Description of Artificial Sequence: Synthetic oligonucleotide
  Target: SCNA; (+) strand; PAM type: YTN; PAM sequence: CTA
tttgtcttttaggctagaat

SEQ ID NO: 80663 - DNA, 20 bp, Artificial Sequence
  Description of Artificial Sequence: Synthetic oligonucleotide
  Target: SCNA; (+) strand; PAM type: YTN; PAM sequence: TTT
gtcttttaggctagaatttt

SEQ ID NO: 80664 - DNA, 20 bp, Artificial Sequence
  Description of Artificial Sequence: Synthetic oligonucleotide
  Target: SCNA; (+) strand; PAM type: YTN; PAM sequence: TTG
tcttttaggctagaattttg

SEQ ID NO: 80665 - DNA, 20 bp, Artificial Sequence
  Description of Artificial Sequence: Synthetic oligonucleotide
  Target: SCNA; (+) strand; PAM type: YTN; PAM sequence: CTT
ttaggctagaattttgtaca

SEQ ID NO: 80666 - DNA, 20 bp, Artificial Sequence
  Description of Artificial Sequence: Synthetic oligonucleotide
  Target: SCNA; (+) strand; PAM type: YTN; PAM sequence: TTT
taggctagaattttgtacaa

SEQ ID NO: 80667 - DNA, 20 bp, Artificial Sequence
  Description of Artificial Sequence: Synthetic oligonucleotide
  Target: SCNA; (+) strand; PAM type: YTN; PAM sequence: TTT
aggctagaattttgtacaac

SEQ ID NO: 80668 - DNA, 20 bp, Artificial Sequence
  Description of Artificial Sequence: Synthetic oligonucleotide
  Target: SCNA; (+) strand; PAM type: YTN; PAM sequence: TTA
ggctagaattttgtacaact

SEQ ID NO: 80669 - DNA, 20 bp, Artificial Sequence
  Description of Artificial Sequence: Synthetic oligonucleotide
  Target: SCNA; (+) strand; PAM type: YTN; PAM sequence: CTA
gaattttgtacaactaccta

SEQ ID NO: 80670 - DNA, 20 bp, Artificial Sequence
  Description of Artificial Sequence: Synthetic oligonucleotide
  Target: SCNA; (+) strand; PAM type: YTN; PAM sequence: TTT
tgtacaactacctaacaact

SEQ ID NO: 80671 - DNA, 20 bp, Artificial Sequence
  Description of Artificial Sequence: Synthetic oligonucleotide
  Target: SCNA; (+) strand; PAM type: YTN; PAM sequence: TTT
gtacaactacctaacaactc

SEQ ID NO: 80672 - DNA, 20 bp, Artificial Sequence
  Description of Artificial Sequence: Synthetic oligonucleotide
  Target: SCNA; (+) strand; PAM type: YTN; PAM sequence: TTG
tacaactacctaacaactcc

SEQ ID NO: 80673 - DNA, 20 bp, Artificial Sequence
  Description of Artificial Sequence: Synthetic oligonucleotide
  Target: SCNA; (+) strand; PAM type: YTN; PAM sequence: CTA
cctaacaactccgtgccact

SEQ ID NO: 80674 - DNA, 20 bp, Artificial Sequence
  Description of Artificial Sequence: Synthetic oligonucleotide
  Target: SCNA; (+) strand; PAM type: YTN; PAM sequence: CTA
acaactccgtgccacttcta

SEQ ID NO: 80675 - DNA, 20 bp, Artificial Sequence
  Description of Artificial Sequence: Synthetic oligonucleotide
  Target: SCNA; (+) strand; PAM type: YTN; PAM sequence: CTC
cgtgccacttctaaggatat

SEQ ID NO: 80676 - DNA, 20 bp, Artificial Sequence
  Description of Artificial Sequence: Synthetic oligonucleotide
  Target: SCNA; (+) strand; PAM type: YTN; PAM sequence: CTT
ctaaggatatggctgatgtc

SEQ ID NO: 80677 - DNA, 20 bp, Artificial Sequence
  Description of Artificial Sequence: Synthetic oligonucleotide
  Target: SCNA; (+) strand; PAM type: YTN; PAM sequence: TTC
taaggatatggctgatgtct

SEQ ID NO: 80678 - DNA, 20 bp, Artificial Sequence
  Description of Artificial Sequence: Synthetic oligonucleotide
  Target: SCNA; (+) strand; PAM type: YTN; PAM sequence: CTA
aggatatggctgatgtctcc

SEQ ID NO: 80679 - DNA, 20 bp, Artificial Sequence
  Description of Artificial Sequence: Synthetic oligonucleotide
  Target: SCNA; (+) strand; PAM type: YTN; PAM sequence: CTG
atgtctccttaagagcaaga

SEQ ID NO: 80680 - DNA, 20 bp, Artificial Sequence
  Description of Artificial Sequence: Synthetic oligonucleotide
  Target: SCNA; (+) strand; PAM type: YTN; PAM sequence: CTC
cttaagagcaagagctattt

SEQ ID NO: 80681 - DNA, 20 bp, Artificial Sequence
  Description of Artificial Sequence: Synthetic oligonucleotide
  Target: SCNA; (+) strand; PAM type: YTN; PAM sequence: CTT
aagagcaagagctatttaca

SEQ ID NO: 80682 - DNA, 20 bp, Artificial Sequence
  Description of Artificial Sequence: Synthetic oligonucleotide
  Target: SCNA; (+) strand; PAM type: YTN; PAM sequence: TTA
agagcaagagctatttacaa

SEQ ID NO: 80683 - DNA, 20 bp, Artificial Sequence
  Description of Artificial Sequence: Synthetic oligonucleotide
  Target: SCNA; (+) strand; PAM type: YTN; PAM sequence: CTA
tttacaattcaaagttcgat

SEQ ID NO: 80684 - DNA, 20 bp, Artificial Sequence
  Description of Artificial Sequence: Synthetic oligonucleotide
  Target: SCNA; (+) strand; PAM type: YTN; PAM sequence: TTT
acaattcaaagttcgattta

SEQ ID NO: 80685 - DNA, 20 bp, Artificial Sequence
  Description of Artificial Sequence: Synthetic oligonucleotide
  Target: SCNA; (+) strand; PAM type: YTN; PAM sequence: TTA
caattcaaagttcgatttaa

SEQ ID NO: 80686 - DNA, 20 bp, Artificial Sequence
  Description of Artificial Sequence: Synthetic oligonucleotide
  Target: SCNA; (+) strand; PAM type: YTN; PAM sequence: TTC
aaagttcgatttaaatgcca

SEQ ID NO: 80687 - DNA, 20 bp, Artificial Sequence
  Description of Artificial Sequence: Synthetic oligonucleotide
  Target: SCNA; (+) strand; PAM type: YTN; PAM sequence: TTC
gatttaaatgccagcgaaaa

SEQ ID NO: 80688 - DNA, 20 bp, Artificial Sequence
  Description of Artificial Sequence: Synthetic oligonucleotide
  Target: SCNA; (+) strand; PAM type: YTN; PAM sequence: TTT
aaatgccagcgaaaagctgt

SEQ ID NO: 80689 - DNA, 20 bp, Artificial Sequence
  Description of Artificial Sequence: Synthetic oligonucleotide
  Target: SCNA; (+) strand; PAM type: YTN; PAM sequence: TTA
aatgccagcgaaaagctgta

SEQ ID NO: 80690 - DNA, 20 bp, Artificial Sequence
  Description of Artificial Sequence: Synthetic oligonucleotide
  Target: SCNA; (+) strand; PAM type: YTN; PAM sequence: CTG
tactgaaaatcttatgtttt

SEQ ID NO: 80691 - DNA, 20 bp, Artificial Sequence
  Description of Artificial Sequence: Synthetic oligonucleotide
  Target: SCNA; (+) strand; PAM type: YTN; PAM sequence: CTG
aaaatcttatgttttaaaac

SEQ ID NO: 80692 - DNA, 20 bp, Artificial Sequence
  Description of Artificial Sequence: Synthetic oligonucleotide
  Target: SCNA; (+) strand; PAM type: YTN; PAM sequence: CTT
atgttttaaaacatttctga

SEQ ID NO: 80693 - DNA, 20 bp, Artificial Sequence
  Description of Artificial Sequence: Synthetic oligonucleotide
  Target: SCNA; (+) strand; PAM type: YTN; PAM sequence: TTA
tgttttaaaacatttctgaa

SEQ ID NO: 80694 - DNA, 20 bp, Artificial Sequence
  Description of Artificial Sequence: Synthetic oligonucleotide
  Target: SCNA; (+) strand; PAM type: YTN; PAM sequence: TTT
taaaacatttctgaaatgtt

SEQ ID NO: 80695 - DNA, 20 bp, Artificial Sequence
  Description of Artificial Sequence: Synthetic oligonucleotide
  Target: SCNA; (+) strand; PAM type: YTN; PAM sequence: TTT
aaaacatttctgaaatgttg

SEQ ID NO: 80696 - DNA, 20 bp, Artificial Sequence
  Description of Artificial Sequence: Synthetic oligonucleotide
  Target: SCNA; (+) strand; PAM type: YTN; PAM sequence: TTA
aaacatttctgaaatgttga

SEQ ID NO: 80697 - DNA, 20 bp, Artificial Sequence
  Description of Artificial Sequence: Synthetic oligonucleotide
  Target: SCNA; (+) strand; PAM type: YTN; PAM sequence: TTT
ctgaaatgttgatcctttaa

SEQ ID NO: 80698 - DNA, 20 bp, Artificial Sequence
  Description of Artificial Sequence: Synthetic oligonucleotide
  Target: SCNA; (+) strand; PAM type: YTN; PAM sequence: TTC
tgaaatgttgatcctttaaa

SEQ ID NO: 80699 - DNA, 20 bp, Artificial Sequence
  Description of Artificial Sequence: Synthetic oligonucleotide
  Target: SCNA; (+) strand; PAM type: YTN; PAM sequence: CTG
aaatgttgatcctttaaaaa

SEQ ID NO: 80700 - DNA, 20 bp, Artificial Sequence
  Description of Artificial Sequence: Synthetic oligonucleotide
  Target: SCNA; (+) strand; PAM type: YTN; PAM sequence: TTG
atcctttaaaaatagtcaat

SEQ ID NO: 80701 - DNA, 20 bp, Artificial Sequence
  Description of Artificial Sequence: Synthetic oligonucleotide
  Target: SCNA; (+) strand; PAM type: YTN; PAM sequence: CTT
taaaaatagtcaattatgtg

SEQ ID NO: 80702 - DNA, 20 bp, Artificial Sequence
  Description of Artificial Sequence: Synthetic oligonucleotide
  Target: SCNA; (+) strand; PAM type: YTN; PAM sequence: TTT
aaaaatagtcaattatgtgt

SEQ ID NO: 80703 - DNA, 20 bp, Artificial Sequence
  Description of Artificial Sequence: Synthetic oligonucleotide
  Target: SCNA; (+) strand; PAM type: YTN; PAM sequence: TTA
aaaatagtcaattatgtgtt

SEQ ID NO: 80704 - DNA, 20 bp, Artificial Sequence
  Description of Artificial Sequence: Synthetic oligonucleotide
  Target: SCNA; (+) strand; PAM type: YTN; PAM sequence: TTA
tgtgtttcaagttgtcattt

SEQ ID NO: 80705 - DNA, 20 bp, Artificial Sequence
  Description of Artificial Sequence: Synthetic oligonucleotide
  Target: SCNA; (+) strand; PAM type: YTN; PAM sequence: TTT
caagttgtcatttttttcct

SEQ ID NO: 80706 - DNA, 20 bp, Artificial Sequence
  Description of Artificial Sequence: Synthetic oligonucleotide
  Target: SCNA; (+) strand; PAM type: YTN; PAM sequence: TTC
aagttgtcatttttttcctt

SEQ ID NO: 80707 - DNA, 20 bp, Artificial Sequence
  Description of Artificial Sequence: Synthetic oligonucleotide
  Target: SCNA; (+) strand; PAM type: YTN; PAM sequence: TTG
tcatttttttccttttcaag

SEQ ID NO: 80708 - DNA, 20 bp, Artificial Sequence
  Description of Artificial Sequence: Synthetic oligonucleotide
  Target: SCNA; (+) strand; PAM type: YTN; PAM sequence: TTT
ttttccttttcaaggacgtg

SEQ ID NO: 80709 - DNA, 20 bp, Artificial Sequence
  Description of Artificial Sequence: Synthetic oligonucleotide
  Target: SCNA; (+) strand; PAM type: YTN; PAM sequence: TTT
tttccttttcaaggacgtga

SEQ ID NO: 80710 - DNA, 20 bp, Artificial Sequence
  Description of Artificial Sequence: Synthetic oligonucleotide
  Target: SCNA; (+) strand; PAM type: YTN; PAM sequence: TTT
ttccttttcaaggacgtgaa

SEQ ID NO: 80711 - DNA, 20 bp, Artificial Sequence
  Description of Artificial Sequence: Synthetic oligonucleotide
  Target: SCNA; (+) strand; PAM type: YTN; PAM sequence: TTT
tccttttcaaggacgtgaat

SEQ ID NO: 80712 - DNA, 20 bp, Artificial Sequence
  Description of Artificial Sequence: Synthetic oligonucleotide
  Target: SCNA; (+) strand; PAM type: YTN; PAM sequence: TTT
ccttttcaaggacgtgaatt

SEQ ID NO: 80713 - DNA, 20 bp, Artificial Sequence
  Description of Artificial Sequence: Synthetic oligonucleotide
  Target: SCNA; (+) strand; PAM type: YTN; PAM sequence: TTC
cttttcaaggacgtgaattg

SEQ ID NO: 80714 - DNA, 20 bp, Artificial Sequence
  Description of Artificial Sequence: Synthetic oligonucleotide
  Target: SCNA; (+) strand; PAM type: YTN; PAM sequence: CTT
ttcaaggacgtgaattgaaa

SEQ ID NO: 80715 - DNA, 20 bp, Artificial Sequence
  Description of Artificial Sequence: Synthetic oligonucleotide
  Target: SCNA; (+) strand; PAM type: YTN; PAM sequence: TTT
tcaaggacgtgaattgaaaa

SEQ ID NO: 80716 - DNA, 20 bp, Artificial Sequence
  Description of Artificial Sequence: Synthetic oligonucleotide
  Target: SCNA; (+) strand; PAM type: YTN; PAM sequence: TTT
caaggacgtgaattgaaaat

SEQ ID NO: 80717 - DNA, 20 bp, Artificial Sequence
  Description of Artificial Sequence: Synthetic oligonucleotide
  Target: SCNA; (+) strand; PAM type: YTN; PAM sequence: TTC
aaggacgtgaattgaaaatt

SEQ ID NO: 80718 - DNA, 20 bp, Artificial Sequence
  Description of Artificial Sequence: Synthetic oligonucleotide
  Target: SCNA; (+) strand; PAM type: YTN; PAM sequence: TTG
aaaattttgcttgaaacgaa

SEQ ID NO: 80719 - DNA, 20 bp, Artificial Sequence
  Description of Artificial Sequence: Synthetic oligonucleotide
  Target: SCNA; (+) strand; PAM type: YTN; PAM sequence: TTT
tgcttgaaacgaacattttc

SEQ ID NO: 80720 - DNA, 20 bp, Artificial Sequence
  Description of Artificial Sequence: Synthetic oligonucleotide
  Target: SCNA; (+) strand; PAM type: YTN; PAM sequence: TTT
gcttgaaacgaacattttct

SEQ ID NO: 80721 - DNA, 20 bp, Artificial Sequence
  Description of Artificial Sequence: Synthetic oligonucleotide
  Target: SCNA; (+) strand; PAM type: YTN; PAM sequence: TTG
cttgaaacgaacattttctt

SEQ ID NO: 80722 - DNA, 20 bp, Artificial Sequence
  Description of Artificial Sequence: Synthetic oligonucleotide
  Target: SCNA; (+) strand; PAM type: YTN; PAM sequence: CTT
gaaacgaacattttcttgtt

SEQ ID NO: 80723 - DNA, 20 bp, Artificial Sequence
  Description of Artificial Sequence: Synthetic oligonucleotide
  Target: SCNA; (+) strand; PAM type: YTN; PAM sequence: TTG
aaacgaacattttcttgtta

SEQ ID NO: 80724 - DNA, 20 bp, Artificial Sequence
  Description of Artificial Sequence: Synthetic oligonucleotide
  Target: SCNA; (+) strand; PAM type: YTN; PAM sequence: TTT
tcttgttataaaatctcaaa

SEQ ID NO: 80725 - DNA, 20 bp, Artificial Sequence
  Description of Artificial Sequence: Synthetic oligonucleotide
  Target: SCNA; (+) strand; PAM type: YTN; PAM sequence: TTT
cttgttataaaatctcaaag

SEQ ID NO: 80726 - DNA, 20 bp, Artificial Sequence
  Description of Artificial Sequence: Synthetic oligonucleotide
  Target: SCNA; (+) strand; PAM type: YTN; PAM sequence: TTC
ttgttataaaatctcaaagc

SEQ ID NO: 80727 - DNA, 20 bp, Artificial Sequence
  Description of Artificial Sequence: Synthetic oligonucleotide
  Target: SCNA; (+) strand; PAM type: YTN; PAM sequence: CTT
gttataaaatctcaaagcga

SEQ ID NO: 80728 - DNA, 20 bp, Artificial Sequence
  Description of Artificial Sequence: Synthetic oligonucleotide
  Target: SCNA; (+) strand; PAM type: YTN; PAM sequence: TTG
ttataaaatctcaaagcgag

SEQ ID NO: 80729 - DNA, 20 bp, Artificial Sequence
  Description of Artificial Sequence: Synthetic oligonucleotide
  Target: SCNA; (+) strand; PAM type: YTN; PAM sequence: TTA
taaaatctcaaagcgagatt

SEQ ID NO: 80730 - DNA, 20 bp, Artificial Sequence
  Description of Artificial Sequence: Synthetic oligonucleotide
  Target: SCNA; (+) strand; PAM type: YTN; PAM sequence: CTC
aaagcgagattaaaaatagg

SEQ ID NO: 80731 - DNA, 20 bp, Artificial Sequence
  Description of Artificial Sequence: Synthetic oligonucleotide
  Target: SCNA; (+) strand; PAM type: YTN; PAM sequence: TTA
aaaataggttttgaattttt

SEQ ID NO: 80732 - DNA, 20 bp, Artificial Sequence
  Description of Artificial Sequence: Synthetic oligonucleotide
  Target: SCNA; (+) strand; PAM type: YTN; PAM sequence: TTT
tgaattttttacagatccag

SEQ ID NO: 80733 - DNA, 20 bp, Artificial Sequence
  Description of Artificial Sequence: Synthetic oligonucleotide
  Target: SCNA; (+) strand; PAM type: YTN; PAM sequence: TTT
gaattttttacagatccagc

SEQ ID NO: 80734 - DNA, 20 bp, Artificial Sequence
  Description of Artificial Sequence: Synthetic oligonucleotide
  Target: SCNA; (+) strand; PAM type: YTN; PAM sequence: TTG
aattttttacagatccagcc

SEQ ID NO: 80735 - DNA, 20 bp, Artificial Sequence
  Description of Artificial Sequence: Synthetic oligonucleotide
  Target: SCNA; (+) strand; PAM type: YTN; PAM sequence: TTT
tttacagatccagccataaa

SEQ ID NO: 80736 - DNA, 20 bp, Artificial Sequence
  Description of Artificial Sequence: Synthetic oligonucleotide
  Target: SCNA; (+) strand; PAM type: YTN; PAM sequence: TTT
ttacagatccagccataaat

SEQ ID NO: 80737 - DNA, 20 bp, Artificial Sequence
  Description of Artificial Sequence: Synthetic oligonucleotide
  Target: SCNA; (+) strand; PAM type: YTN; PAM sequence: TTT
tacagatccagccataaatt

SEQ ID NO: 80738 - DNA, 20 bp, Artificial Sequence
  Description of Artificial Sequence: Synthetic oligonucleotide
  Target: SCNA; (+) strand; PAM type: YTN; PAM sequence: TTT
acagatccagccataaattt

SEQ ID NO: 80739 - DNA, 20 bp, Artificial Sequence
  Description of Artificial Sequence: Synthetic oligonucleotide
  Target: SCNA; (+) strand; PAM type: YTN; PAM sequence: TTA
cagatccagccataaatttt

SEQ ID NO: 80740 - DNA, 20 bp, Artificial Sequence
  Description of Artificial Sequence: Synthetic oligonucleotide
  Target: SCNA; (+) strand; PAM type: YTN; PAM sequence: TTT
tataatatctagatagcctt

SEQ ID NO: 80741 - DNA, 20 bp, Artificial Sequence
  Description of Artificial Sequence: Synthetic oligonucleotide
  Target: SCNA; (+) strand; PAM type: YTN; PAM sequence: TTT
ataatatctagatagccttt

SEQ ID NO: 80742 - DNA, 20 bp, Artificial Sequence
  Description of Artificial Sequence: Synthetic oligonucleotide
  Target: SCNA; (+) strand; PAM type: YTN; PAM sequence: TTA
taatatctagatagcctttt

SEQ ID NO: 80743 - DNA, 20 bp, Artificial Sequence
  Description of Artificial Sequence: Synthetic oligonucleotide
  Target: SCNA; (+) strand; PAM type: YTN; PAM sequence: CTA
gatagccttttatatatgta

SEQ ID NO: 80744 - DNA, 20 bp, Artificial Sequence
  Description of Artificial Sequence: Synthetic oligonucleotide
  Target: SCNA; (+) strand; PAM type: YTN; PAM sequence: CTT
ttatatatgtataaatttta

SEQ ID NO: 80745 - DNA, 20 bp, Artificial Sequence
  Description of Artificial Sequence: Synthetic oligonucleotide
  Target: SCNA; (+) strand; PAM type: YTN; PAM sequence: TTT
tatatatgtataaattttaa

SEQ ID NO: 80746 - DNA, 20 bp, Artificial Sequence
  Description of Artificial Sequence: Synthetic oligonucleotide
  Target: SCNA; (+) strand; PAM type: YTN; PAM sequence: TTT
atatatgtataaattttaat

SEQ ID NO: 80747 - DNA, 20 bp, Artificial Sequence
  Description of Artificial Sequence: Synthetic oligonucleotide
  Target: SCNA; (+) strand; PAM type: YTN; PAM sequence: TTA
tatatgtataaattttaatc

SEQ ID NO: 80748 - DNA, 20 bp, Artificial Sequence
  Description of Artificial Sequence: Synthetic oligonucleotide
  Target: SCNA; (+) strand; PAM type: YTN; PAM sequence: TTT
taatctagttttaatgcaat

SEQ ID NO: 80749 - DNA, 20 bp, Artificial Sequence
  Description of Artificial Sequence: Synthetic oligonucleotide
  Target: SCNA; (+) strand; PAM type: YTN; PAM sequence: TTT
aatctagttttaatgcaata

SEQ ID NO: 80750 - DNA, 20 bp, Artificial Sequence
  Description of Artificial Sequence: Synthetic oligonucleotide
  Target: SCNA; (+) strand; PAM type: YTN; PAM sequence: TTA
atctagttttaatgcaatac

SEQ ID NO: 80751 - DNA, 20 bp, Artificial Sequence
  Description of Artificial Sequence: Synthetic oligonucleotide
  Target: SCNA; (+) strand; PAM type: YTN; PAM sequence: CTA
gttttaatgcaatacactgc

SEQ ID NO: 80752 - DNA, 20 bp, Artificial Sequence
  Description of Artificial Sequence: Synthetic oligonucleotide
  Target: SCNA; (+) strand; PAM type: YTN; PAM sequence: TTT
taatgcaatacactgcacag

SEQ ID NO: 80753 - DNA, 20 bp, Artificial Sequence
  Description of Artificial Sequence: Synthetic oligonucleotide
  Target: SCNA; (+) strand; PAM type: YTN; PAM sequence: TTT
aatgcaatacactgcacagt

SEQ ID NO: 80754 - DNA, 20 bp, Artificial Sequence
  Description of Artificial Sequence: Synthetic oligonucleotide
  Target: SCNA; (+) strand; PAM type: YTN; PAM sequence: TTA
atgcaatacactgcacagta

SEQ ID NO: 80755 - DNA, 20 bp, Artificial Sequence
  Description of Artificial Sequence: Synthetic oligonucleotide
  Target: SCNA; (+) strand; PAM type: YTN; PAM sequence: CTG
cacagtaaaatgtactctac

SEQ ID NO: 80756 - DNA, 20 bp, Artificial Sequence
  Description of Artificial Sequence: Synthetic oligonucleotide
  Target: SCNA; (+) strand; PAM type: YTN; PAM sequence: CTC
tacacattattataattttg

SEQ ID NO: 80757 - DNA, 20 bp, Artificial Sequence
  Description of Artificial Sequence: Synthetic oligonucleotide
  Target: SCNA; (+) strand; PAM type: YTN; PAM sequence: CTA
cacattattataattttgtt

SEQ ID NO: 80758 - DNA, 20 bp, Artificial Sequence
  Description of Artificial Sequence: Synthetic oligonucleotide
  Target: SCNA; (+) strand; PAM type: YTN; PAM sequence: TTA
ttataattttgttgttttat

SEQ ID NO: 80759 - DNA, 20 bp, Artificial Sequence
  Description of Artificial Sequence: Synthetic oligonucleotide
  Target: SCNA; (+) strand; PAM type: YTN; PAM sequence: TTA
taattttgttgttttattat

SEQ ID NO: 80760 - DNA, 20 bp, Artificial Sequence
  Description of Artificial Sequence: Synthetic oligonucleotide
  Target: SCNA; (+) strand; PAM type: YTN; PAM sequence: TTT
tgttgttttattattataat

SEQ ID NO: 80761 - DNA, 20 bp, Artificial Sequence
  Description of Artificial Sequence: Synthetic oligonucleotide
  Target: SCNA; (+) strand; PAM type: YTN; PAM sequence: TTT
gttgttttattattataatc

SEQ ID NO: 80762 - DNA, 20 bp, Artificial Sequence
  Description of Artificial Sequence: Synthetic oligonucleotide
  Target: SCNA; (+) strand; PAM type: YTN; PAM sequence: TTG
ttgttttattattataatca

SEQ ID NO: 80763 - DNA, 20 bp, Artificial Sequence
  Description of Artificial Sequence: Synthetic oligonucleotide
  Target: SCNA; (+) strand; PAM type: YTN; PAM sequence: TTG
ttttattattataatcataa

SEQ ID NO: 80764 - DNA, 20 bp, Artificial Sequence
  Description of Artificial Sequence: Synthetic oligonucleotide
  Target: SCNA; (+) strand; PAM type: YTN; PAM sequence: TTT
tattattataatcataaata

SEQ ID NO: 80765 - DNA, 20 bp, Artificial Sequence
  Description of Artificial Sequence: Synthetic oligonucleotide
  Target: SCNA; (+) strand; PAM type: YTN; PAM sequence: TTT
attattataatcataaataa

SEQ ID NO: 80766 - DNA, 20 bp, Artificial Sequence
  Description of Artificial Sequence: Synthetic oligonucleotide
  Target: SCNA; (+) strand; PAM type: YTN; PAM sequence: TTA
ttattataatcataaataaa

SEQ ID NO: 80767 - DNA, 20 bp, Artificial Sequence
  Description of Artificial Sequence: Synthetic oligonucleotide
  Target: SCNA; (+) strand; PAM type: YTN; PAM sequence: TTA
ttataatcataaataaaatg

SEQ ID NO: 80768 - DNA, 20 bp, Artificial Sequence
  Description of Artificial Sequence: Synthetic oligonucleotide
  Target: SCNA; (+) strand; PAM type: YTN; PAM sequence: TTA
taatcataaataaaatggct

SEQ ID NO: 80769 - DNA, 20 bp, Artificial Sequence
  Description of Artificial Sequence: Synthetic oligonucleotide
  Target: SCNA; (+) strand; PAM type: YTN; PAM sequence: CTA
cattacaaaatgacagagtg

SEQ ID NO: 80770 - DNA, 20 bp, Artificial Sequence
  Description of Artificial Sequence: Synthetic oligonucleotide
  Target: SCNA; (+) strand; PAM type: YTN; PAM sequence: TTA
caaaatgacagagtgtacat

SEQ ID NO: 80771 - DNA, 20 bp, Artificial Sequence
  Description of Artificial Sequence: Synthetic oligonucleotide
  Target: SCNA; (+) strand; PAM type: YTN; PAM sequence: TTT
aaaaacatttctgtagaact

SEQ ID NO: 80772 - DNA, 20 bp, Artificial Sequence
  Description of Artificial Sequence: Synthetic oligonucleotide
  Target: SCNA; (+) strand; PAM type: YTN; PAM sequence: TTA
aaaacatttctgtagaactg

SEQ ID NO: 80773 - DNA, 20 bp, Artificial Sequence
  Description of Artificial Sequence: Synthetic oligonucleotide
  Target: SCNA; (+) strand; PAM type: YTN; PAM sequence: TTT
ctgtagaactgatttctcta

SEQ ID NO: 80774 - DNA, 20 bp, Artificial Sequence
  Description of Artificial Sequence: Synthetic oligonucleotide
  Target: SCNA; (+) strand; PAM type: YTN; PAM sequence: TTC
tgtagaactgatttctctag

SEQ ID NO: 80775 - DNA, 20 bp, Artificial Sequence
  Description of Artificial Sequence: Synthetic oligonucleotide
  Target: SCNA; (+) strand; PAM type: YTN; PAM sequence: CTG
tagaactgatttctctagta

SEQ ID NO: 80776 - DNA, 20 bp, Artificial Sequence
  Description of Artificial Sequence: Synthetic oligonucleotide
  Target: SCNA; (+) strand; PAM type: YTN; PAM sequence: CTG
atttctctagtagggtctct

SEQ ID NO: 80777 - DNA, 20 bp, Artificial Sequence
  Description of Artificial Sequence: Synthetic oligonucleotide
  Target: SCNA; (+) strand; PAM type: YTN; PAM sequence: TTT
ctctagtagggtctctgctg

SEQ ID NO: 80778 - DNA, 20 bp, Artificial Sequence
  Description of Artificial Sequence: Synthetic oligonucleotide
  Target: SCNA; (+) strand; PAM type: YTN; PAM sequence: TTC
tctagtagggtctctgctga

SEQ ID NO: 80779 - DNA, 20 bp, Artificial Sequence
  Description of Artificial Sequence: Synthetic oligonucleotide
  Target: SCNA; (+) strand; PAM type: YTN; PAM sequence: CTC
tagtagggtctctgctgacc

SEQ ID NO: 80780 - DNA, 20 bp, Artificial Sequence
  Description of Artificial Sequence: Synthetic oligonucleotide
  Target: SCNA; (+) strand; PAM type: YTN; PAM sequence: CTA
gtagggtctctgctgacctt

SEQ ID NO: 80781 - DNA, 20 bp, Artificial Sequence
  Description of Artificial Sequence: Synthetic oligonucleotide
  Target: SCNA; (+) strand; PAM type: YTN; PAM sequence: CTC
tgctgacctttaacctctat

SEQ ID NO: 80782 - DNA, 20 bp, Artificial Sequence
  Description of Artificial Sequence: Synthetic oligonucleotide
  Target: SCNA; (+) strand; PAM type: YTN; PAM sequence: CTG
ctgacctttaacctctattt

SEQ ID NO: 80783 - DNA, 20 bp, Artificial Sequence
  Description of Artificial Sequence: Synthetic oligonucleotide
  Target: SCNA; (+) strand; PAM type: YTN; PAM sequence: CTG
acctttaacctctatttttc

SEQ ID NO: 80784 - DNA, 20 bp, Artificial Sequence
  Description of Artificial Sequence: Synthetic oligonucleotide
  Target: SCNA; (+) strand; PAM type: YTN; PAM sequence: CTT
taacctctatttttcccctt

SEQ ID NO: 80785 - DNA, 20 bp, Artificial Sequence
  Description of Artificial Sequence: Synthetic oligonucleotide
  Target: SCNA; (+) strand; PAM type: YTN; PAM sequence: TTT
aacctctatttttccccttg

SEQ ID NO: 80786 - DNA, 20 bp, Artificial Sequence
  Description of Artificial Sequence: Synthetic oligonucleotide
  Target: SCNA; (+) strand; PAM type: YTN; PAM sequence: TTA
acctctatttttccccttga

SEQ ID NO: 80787 - DNA, 20 bp, Artificial Sequence
  Description of Artificial Sequence: Synthetic oligonucleotide
  Target: SCNA; (+) strand; PAM type: YTN; PAM sequence: CTC
tatttttccccttgagggcc

SEQ ID NO: 80788 - DNA, 20 bp, Artificial Sequence
  Description of Artificial Sequence: Synthetic oligonucleotide
  Target: SCNA; (+) strand; PAM type: YTN; PAM sequence: CTA
tttttccccttgagggcctt

SEQ ID NO: 80789 - DNA, 20 bp, Artificial Sequence
  Description of Artificial Sequence: Synthetic oligonucleotide
  Target: SCNA; (+) strand; PAM type: YTN; PAM sequence: TTT
ttccccttgagggcctttca

SEQ ID NO: 80790 - DNA, 20 bp, Artificial Sequence
  Description of Artificial Sequence: Synthetic oligonucleotide
  Target: SCNA; (+) strand; PAM type: YTN; PAM sequence: TTT
tccccttgagggcctttcac

SEQ ID NO: 80791 - DNA, 20 bp, Artificial Sequence
  Description of Artificial Sequence: Synthetic oligonucleotide
  Target: SCNA; (+) strand; PAM type: YTN; PAM sequence: TTT
ccccttgagggcctttcaca

SEQ ID NO: 80792 - DNA, 20 bp, Artificial Sequence
  Description of Artificial Sequence: Synthetic oligonucleotide
  Target: SCNA; (+) strand; PAM type: YTN; PAM sequence: TTC
cccttgagggcctttcacac

SEQ ID NO: 80793 - DNA, 20 bp, Artificial Sequence
  Description of Artificial Sequence: Synthetic oligonucleotide
  Target: SCNA; (+) strand; PAM type: YTN; PAM sequence: CTT
gagggcctttcacactatct

SEQ ID NO: 80794 - DNA, 20 bp, Artificial Sequence
  Description of Artificial Sequence: Synthetic oligonucleotide
  Target: SCNA; (+) strand; PAM type: YTN; PAM sequence: TTG
agggcctttcacactatctc

SEQ ID NO: 80795 - DNA, 20 bp, Artificial Sequence
  Description of Artificial Sequence: Synthetic oligonucleotide
  Target: SCNA; (+) strand; PAM type: YTN; PAM sequence: CTT
tcacactatctctctactca

SEQ ID NO: 80796 - DNA, 20 bp, Artificial Sequence
  Description of Artificial Sequence: Synthetic oligonucleotide
  Target: SCNA; (+) strand; PAM type: YTN; PAM sequence: TTT
cacactatctctctactcac

SEQ ID NO: 80797 - DNA, 20 bp, Artificial Sequence
  Description of Artificial Sequence: Synthetic oligonucleotide
  Target: SCNA; (+) strand; PAM type: YTN; PAM sequence: TTC
acactatctctctactcact

SEQ ID NO: 80798 - DNA, 20 bp, Artificial Sequence
  Description of Artificial Sequence: Synthetic oligonucleotide
  Target: SCNA; (+) strand; PAM type: YTN; PAM sequence: CTA
tctctctactcactgacatt

SEQ ID NO: 80799 - DNA, 20 bp, Artificial Sequence
  Description of Artificial Sequence: Synthetic oligonucleotide
  Target: SCNA; (+) strand; PAM type: YTN; PAM sequence: CTC
tctactcactgacattccaa

SEQ ID NO: 80800 - DNA, 20 bp, Artificial Sequence
  Description of Artificial Sequence: Synthetic oligonucleotide
  Target: SCNA; (+) strand; PAM type: YTN; PAM sequence: CTC
tactcactgacattccaaat

SEQ ID NO: 80801 - DNA, 20 bp, Artificial Sequence
  Description of Artificial Sequence: Synthetic oligonucleotide
  Target: SCNA; (+) strand; PAM type: YTN; PAM sequence: CTA
ctcactgacattccaaatga

SEQ ID NO: 80802 - DNA, 20 bp, Artificial Sequence
  Description of Artificial Sequence: Synthetic oligonucleotide
  Target: SCNA; (+) strand; PAM type: YTN; PAM sequence: CTC
actgacattccaaatgacgg

SEQ ID NO: 80803 - DNA, 20 bp, Artificial Sequence
  Description of Artificial Sequence: Synthetic oligonucleotide
  Target: SCNA; (+) strand; PAM type: YTN; PAM sequence: CTG
acattccaaatgacgggtga

SEQ ID NO: 80804 - DNA, 20 bp, Artificial Sequence
  Description of Artificial Sequence: Synthetic oligonucleotide
  Target: SCNA; (+) strand; PAM type: YTN; PAM sequence: TTC
caaatgacgggtgacaaaac

SEQ ID NO: 80805 - DNA, 20 bp, Artificial Sequence
  Description of Artificial Sequence: Synthetic oligonucleotide
  Target: SCNA; (+) strand; PAM type: YTN; PAM sequence: CTC
atattagtacattttgggtc

SEQ ID NO: 80806 - DNA, 20 bp, Artificial Sequence
  Description of Artificial Sequence: Synthetic oligonucleotide
  Target: SCNA; (+) strand; PAM type: YTN; PAM sequence: TTA
gtacattttgggtctaataa

SEQ ID NO: 80807 - DNA, 20 bp, Artificial Sequence
  Description of Artificial Sequence: Synthetic oligonucleotide
  Target: SCNA; (+) strand; PAM type: YTN; PAM sequence: TTT
tgggtctaataaatggtaac

SEQ ID NO: 80808 - DNA, 20 bp, Artificial Sequence
  Description of Artificial Sequence: Synthetic oligonucleotide
  Target: SCNA; (+) strand; PAM type: YTN; PAM sequence: TTT
gggtctaataaatggtaact

SEQ ID NO: 80809 - DNA, 20 bp, Artificial Sequence
  Description of Artificial Sequence: Synthetic oligonucleotide
  Target: SCNA; (+) strand; PAM type: YTN; PAM sequence: TTG
ggtctaataaatggtaactg

SEQ ID NO: 80810 - DNA, 20 bp, Artificial Sequence
  Description of Artificial Sequence: Synthetic oligonucleotide
  Target: SCNA; (+) strand; PAM type: YTN; PAM sequence: CTA
ataaatggtaactgtttttc

SEQ ID NO: 80811 - DNA, 20 bp, Artificial Sequence
  Description of Artificial Sequence: Synthetic oligonucleotide
  Target: SCNA; (+) strand; PAM type: YTN; PAM sequence: CTG
tttttcggcaattgagttct

SEQ ID NO: 80812 - DNA, 20 bp, Artificial Sequence
  Description of Artificial Sequence: Synthetic oligonucleotide
  Target: SCNA; (+) strand; PAM type: YTN; PAM sequence: TTT
ttcggcaattgagttctttg

SEQ ID NO: 80813 - DNA, 20 bp, Artificial Sequence
  Description of Artificial Sequence: Synthetic oligonucleotide
  Target: SCNA; (+) strand; PAM type: YTN; PAM sequence: TTT
tcggcaattgagttctttga

SEQ ID NO: 80814 - DNA, 20 bp, Artificial Sequence
  Description of Artificial Sequence: Synthetic oligonucleotide
  Target: SCNA; (+) strand; PAM type: YTN; PAM sequence: TTT
cggcaattgagttctttgaa

SEQ ID NO: 80815 - DNA, 20 bp, Artificial Sequence
  Description of Artificial Sequence: Synthetic oligonucleotide
  Target: SCNA; (+) strand; PAM type: YTN; PAM sequence: TTC
ggcaattgagttctttgaaa

SEQ ID NO: 80816 - DNA, 20 bp, Artificial Sequence
  Description of Artificial Sequence: Synthetic oligonucleotide
  Target: SCNA; (+) strand; PAM type: YTN; PAM sequence: TTG
agttctttgaaatcagggat

SEQ ID NO: 80817 - DNA, 20 bp, Artificial Sequence
  Description of Artificial Sequence: Synthetic oligonucleotide
  Target: SCNA; (+) strand; PAM type: YTN; PAM sequence: TTC
tttgaaatcagggattctgc

SEQ ID NO: 80818 - DNA, 20 bp, Artificial Sequence
  Description of Artificial Sequence: Synthetic oligonucleotide
  Target: SCNA; (+) strand; PAM type: YTN; PAM sequence: CTT
tgaaatcagggattctgctt

SEQ ID NO: 80819 - DNA, 20 bp, Artificial Sequence
  Description of Artificial Sequence: Synthetic oligonucleotide
  Target: SCNA; (+) strand; PAM type: YTN; PAM sequence: TTT
gaaatcagggattctgcttt

SEQ ID NO: 80820 - DNA, 20 bp, Artificial Sequence
  Description of Artificial Sequence: Synthetic oligonucleotide
  Target: SCNA; (+) strand; PAM type: YTN; PAM sequence: TTG
aaatcagggattctgcttta

SEQ ID NO: 80821 - DNA, 20 bp, Artificial Sequence
  Description of Artificial Sequence: Synthetic oligonucleotide
  Target: SCNA; (+) strand; PAM type: YTN; PAM sequence: TTC
tgctttatttttctttatat

SEQ ID NO: 80822 - DNA, 20 bp, Artificial Sequence
  Description of Artificial Sequence: Synthetic oligonucleotide
  Target: SCNA; (+) strand; PAM type: YTN; PAM sequence: CTG
ctttatttttctttatatta

SEQ ID NO: 80823 - DNA, 20 bp, Artificial Sequence
  Description of Artificial Sequence: Synthetic oligonucleotide
  Target: SCNA; (+) strand; PAM type: YTN; PAM sequence: CTT
tatttttctttatattattt

SEQ ID NO: 80824 - DNA, 20 bp, Artificial Sequence
  Description of Artificial Sequence: Synthetic oligonucleotide
  Target: SCNA; (+) strand; PAM type: YTN; PAM sequence: TTT
atttttctttatattatttc

SEQ ID NO: 80825 - DNA, 20 bp, Artificial Sequence
  Description of Artificial Sequence: Synthetic oligonucleotide
  Target: SCNA; (+) strand; PAM type: YTN; PAM sequence: TTA
tttttctttatattatttca

SEQ ID NO: 80826 - DNA, 20 bp, Artificial Sequence
  Description of Artificial Sequence: Synthetic oligonucleotide
  Target: SCNA; (+) strand; PAM type: YTN; PAM sequence: TTT
ttctttatattatttcatag

SEQ ID NO: 80827 - DNA, 20 bp, Artificial Sequence
  Description of Artificial Sequence: Synthetic oligonucleotide
  Target: SCNA; (+) strand; PAM type: YTN; PAM sequence: TTT
tctttatattatttcatagt

SEQ ID NO: 80828 - DNA, 20 bp, Artificial Sequence
  Description of Artificial Sequence: Synthetic oligonucleotide
  Target: SCNA; (+) strand; PAM type: YTN; PAM sequence: TTT
ctttatattatttcatagta

SEQ ID NO: 80829 - DNA, 20 bp, Artificial Sequence
  Description of Artificial Sequence: Synthetic oligonucleotide
  Target: SCNA; (+) strand; PAM type: YTN; PAM sequence: TTC
tttatattatttcatagtag

SEQ ID NO: 80830 - DNA, 20 bp, Artificial Sequence
  Description of Artificial Sequence: Synthetic oligonucleotide
  Target: SCNA; (+) strand; PAM type: YTN; PAM sequence: CTT
tatattatttcatagtagat

SEQ ID NO: 80831 - DNA, 20 bp, Artificial Sequence
  Description of Artificial Sequence: Synthetic oligonucleotide
  Target: SCNA; (+) strand; PAM type: YTN; PAM sequence: TTT
atattatttcatagtagata

SEQ ID NO: 80832 - DNA, 20 bp, Artificial Sequence
  Description of Artificial Sequence: Synthetic oligonucleotide
  Target: SCNA; (+) strand; PAM type: YTN; PAM sequence: TTA
tattatttcatagtagataa

SEQ ID NO: 80833 - DNA, 20 bp, Artificial Sequence
  Description of Artificial Sequence: Synthetic oligonucleotide
  Target: SCNA; (+) strand; PAM type: YTN; PAM sequence: TTA
tttcatagtagataataaat

SEQ ID NO: 80834 - DNA, 20 bp, Artificial Sequence
  Description of Artificial Sequence: Synthetic oligonucleotide
  Target: SCNA; (+) strand; PAM type: YTN; PAM sequence: TTT
catagtagataataaataat

SEQ ID NO: 80835 - DNA, 20 bp, Artificial Sequence
  Description of Artificial Sequence: Synthetic oligonucleotide
  Target: SCNA; (+) strand; PAM type: YTN; PAM sequence: TTC
atagtagataataaataatt

SEQ ID NO: 80836 - DNA, 20 bp, Artificial Sequence
  Description of Artificial Sequence: Synthetic oligonucleotide
  Target: SCNA; (+) strand; PAM type: YTN; PAM sequence: TTT
agaatatactaaaatgaatt

SEQ ID NO: 80837 - DNA, 20 bp, Artificial Sequence
  Description of Artificial Sequence: Synthetic oligonucleotide
  Target: SCNA; (+) strand; PAM type: YTN; PAM sequence: TTA
gaatatactaaaatgaattt

SEQ ID NO: 80838 - DNA, 20 bp, Artificial Sequence
  Description of Artificial Sequence: Synthetic oligonucleotide
  Target: SCNA; (+) strand; PAM type: YTN; PAM sequence: CTA
aaatgaatttagtgtctacc

SEQ ID NO: 80839 - DNA, 20 bp, Artificial Sequence
  Description of Artificial Sequence: Synthetic oligonucleotide
  Target: SCNA; (+) strand; PAM type: YTN; PAM sequence: TTT
agtgtctacctctaatgtct

SEQ ID NO: 80840 - DNA, 20 bp, Artificial Sequence
  Description of Artificial Sequence: Synthetic oligonucleotide
  Target: SCNA; (+) strand; PAM type: YTN; PAM sequence: TTA
gtgtctacctctaatgtctg

SEQ ID NO: 80841 - DNA, 20 bp, Artificial Sequence
  Description of Artificial Sequence: Synthetic oligonucleotide
  Target: SCNA; (+) strand; PAM type: YTN; PAM sequence: CTA
cctctaatgtctgcattaat

SEQ ID NO: 80842 - DNA, 20 bp, Artificial Sequence
  Description of Artificial Sequence: Synthetic oligonucleotide
  Target: SCNA; (+) strand; PAM type: YTN; PAM sequence: CTC
taatgtctgcattaatataa

SEQ ID NO: 80843 - DNA, 20 bp, Artificial Sequence
  Description of Artificial Sequence: Synthetic oligonucleotide
  Target: SCNA; (+) strand; PAM type: YTN; PAM sequence: CTA
atgtctgcattaatataaat

SEQ ID NO: 80844 - DNA, 20 bp, Artificial Sequence
  Description of Artificial Sequence: Synthetic oligonucleotide
  Target: SCNA; (+) strand; PAM type: YTN; PAM sequence: CTG
cattaatataaataataggt

SEQ ID NO: 80845 - DNA, 20 bp, Artificial Sequence
  Description of Artificial Sequence: Synthetic oligonucleotide
  Target: SCNA; (+) strand; PAM type: YTN; PAM sequence: TTA
atataaataataggtttata

SEQ ID NO: 80846 - DNA, 20 bp, Artificial Sequence
  Description of Artificial Sequence: Synthetic oligonucleotide
  Target: SCNA; (+) strand; PAM type: YTN; PAM sequence: TTT
atatttgactttagctactt

SEQ ID NO: 80847 - DNA, 20 bp, Artificial Sequence
  Description of Artificial Sequence: Synthetic oligonucleotide
  Target: SCNA; (+) strand; PAM type: YTN; PAM sequence: TTA
tatttgactttagctacttt

SEQ ID NO: 80848 - DNA, 20 bp, Artificial Sequence
  Description of Artificial Sequence: Synthetic oligonucleotide
  Target: SCNA; (+) strand; PAM type: YTN; PAM sequence: TTT
gactttagctactttaaaaa

SEQ ID NO: 80849 - DNA, 20 bp, Artificial Sequence
  Description of Artificial Sequence: Synthetic oligonucleotide
  Target: SCNA; (+) strand; PAM type: YTN; PAM sequence: TTG
actttagctactttaaaaat

SEQ ID NO: 80850 - DNA, 20 bp, Artificial Sequence
  Description of Artificial Sequence: Synthetic oligonucleotide
  Target: SCNA; (+) strand; PAM type: YTN; PAM sequence: CTT
tagctactttaaaaataaaa

SEQ ID NO: 80851 - DNA, 20 bp, Artificial Sequence
  Description of Artificial Sequence: Synthetic oligonucleotide
  Target: SCNA; (+) strand; PAM type: YTN; PAM sequence: TTT
agctactttaaaaataaaat

SEQ ID NO: 80852 - DNA, 20 bp, Artificial Sequence
  Description of Artificial Sequence: Synthetic oligonucleotide
  Target: SCNA; (+) strand; PAM type: YTN; PAM sequence: TTA
gctactttaaaaataaaatt

SEQ ID NO: 80853 - DNA, 20 bp, Artificial Sequence
  Description of Artificial Sequence: Synthetic oligonucleotide
  Target: SCNA; (+) strand; PAM type: YTN; PAM sequence: CTA
ctttaaaaataaaattccaa

SEQ ID NO: 80854 - DNA, 20 bp, Artificial Sequence
  Description of Artificial Sequence: Synthetic oligonucleotide
  Target: SCNA; (+) strand; PAM type: YTN; PAM sequence: CTT
taaaaataaaattccaaaaa

SEQ ID NO: 80855 - DNA, 20 bp, Artificial Sequence
  Description of Artificial Sequence: Synthetic oligonucleotide
  Target: SCNA; (+) strand; PAM type: YTN; PAM sequence: TTT
aaaaataaaattccaaaaag

SEQ ID NO: 80856 - DNA, 20 bp, Artificial Sequence
  Description of Artificial Sequence: Synthetic oligonucleotide
  Target: SCNA; (+) strand; PAM type: YTN; PAM sequence: TTA
aaaataaaattccaaaaagg

SEQ ID NO: 80857 - DNA, 20 bp, Artificial Sequence
  Description of Artificial Sequence: Synthetic oligonucleotide
  Target: SCNA; (+) strand; PAM type: YTN; PAM sequence: TTC
caaaaaggaaatgtgatacc

SEQ ID NO: 80858 - DNA, 20 bp, Artificial Sequence
  Description of Artificial Sequence: Synthetic oligonucleotide
  Target: SCNA; (+) strand; PAM type: YTN; PAM sequence: CTT
ttagaatagatatagccaaa

SEQ ID NO: 80859 - DNA, 20 bp, Artificial Sequence
  Description of Artificial Sequence: Synthetic oligonucleotide
  Target: SCNA; (+) strand; PAM type: YTN; PAM sequence: TTT
tagaatagatatagccaaat

SEQ ID NO: 80860 - DNA, 20 bp, Artificial Sequence
  Description of Artificial Sequence: Synthetic oligonucleotide
  Target: SCNA; (+) strand; PAM type: YTN; PAM sequence: TTT
agaatagatatagccaaatc

SEQ ID NO: 80861 - DNA, 20 bp, Artificial Sequence
  Description of Artificial Sequence: Synthetic oligonucleotide
  Target: SCNA; (+) strand; PAM type: YTN; PAM sequence: TTA
gaatagatatagccaaatct

SEQ ID NO: 80862 - DNA, 20 bp, Artificial Sequence
  Description of Artificial Sequence: Synthetic oligonucleotide
  Target: SCNA; (+) strand; PAM type: YTN; PAM sequence: CTA
acctttgacattaaacaaaa

SEQ ID NO: 80863 - DNA, 20 bp, Artificial Sequence
  Description of Artificial Sequence: Synthetic oligonucleotide
  Target: SCNA; (+) strand; PAM type: YTN; PAM sequence: CTT
tgacattaaacaaaattata

SEQ ID NO: 80864 - DNA, 20 bp, Artificial Sequence
  Description of Artificial Sequence: Synthetic oligonucleotide
  Target: SCNA; (+) strand; PAM type: YTN; PAM sequence: TTT
gacattaaacaaaattataa

SEQ ID NO: 80865 - DNA, 20 bp, Artificial Sequence
  Description of Artificial Sequence: Synthetic oligonucleotide
  Target: SCNA; (+) strand; PAM type: YTN; PAM sequence: TTG
acattaaacaaaattataaa

SEQ ID NO: 80866 - DNA, 20 bp, Artificial Sequence
  Description of Artificial Sequence: Synthetic oligonucleotide
  Target: SCNA; (+) strand; PAM type: YTN; PAM sequence: TTA
aacaaaattataaaattaat

SEQ ID NO: 80867 - DNA, 20 bp, Artificial Sequence
  Description of Artificial Sequence: Synthetic oligonucleotide
  Target: SCNA; (+) strand; PAM type: YTN; PAM sequence: TTA
taaaattaatatatggtttt

SEQ ID NO: 80868 - DNA, 20 bp, Artificial Sequence
  Description of Artificial Sequence: Synthetic oligonucleotide
  Target: SCNA; (+) strand; PAM type: YTN; PAM sequence: TTA
atatatggttttgaattgtt

SEQ ID NO: 80869 - DNA, 20 bp, Artificial Sequence
  Description of Artificial Sequence: Synthetic oligonucleotide
  Target: SCNA; (+) strand; PAM type: YTN; PAM sequence: TTT
tgaattgttatacaagtaaa

SEQ ID NO: 80870 - DNA, 20 bp, Artificial Sequence
  Description of Artificial Sequence: Synthetic oligonucleotide
  Target: SCNA; (+) strand; PAM type: YTN; PAM sequence: TTT
gaattgttatacaagtaaat

SEQ ID NO: 80871 - DNA, 20 bp, Artificial Sequence
  Description of Artificial Sequence: Synthetic oligonucleotide
  Target: SCNA; (+) strand; PAM type: YTN; PAM sequence: TTG
aattgttatacaagtaaata

SEQ ID NO: 80872 - DNA, 20 bp, Artificial Sequence
  Description of Artificial Sequence: Synthetic oligonucleotide
  Target: SCNA; (+) strand; PAM type: YTN; PAM sequence: TTG
ttatacaagtaaatatgtat

SEQ ID NO: 80873 - DNA, 20 bp, Artificial Sequence
  Description of Artificial Sequence: Synthetic oligonucleotide
  Target: SCNA; (+) strand; PAM type: YTN; PAM sequence: TTA
tacaagtaaatatgtatatt

SEQ ID NO: 80874 - DNA, 20 bp, Artificial Sequence
  Description of Artificial Sequence: Synthetic oligonucleotide
  Target: SCNA; (+) strand; PAM type: YTN; PAM sequence: TTT
aaatatacatatgtaaatat

SEQ ID NO: 80875 - DNA, 20 bp, Artificial Sequence
  Description of Artificial Sequence: Synthetic oligonucleotide
  Target: SCNA; (+) strand; PAM type: YTN; PAM sequence: TTA
aatatacatatgtaaatatg

SEQ ID NO: 80876 - DNA, 20 bp, Artificial Sequence
  Description of Artificial Sequence: Synthetic oligonucleotide
  Target: SCNA; (+) strand; PAM type: YTN; PAM sequence: TTT
aaagaaaataaatttgaaac

SEQ ID NO: 80877 - DNA, 20 bp, Artificial Sequence
  Description of Artificial Sequence: Synthetic oligonucleotide
  Target: SCNA; (+) strand; PAM type: YTN; PAM sequence: TTA
aagaaaataaatttgaaaca

SEQ ID NO: 80878 - DNA, 20 bp, Artificial Sequence
  Description of Artificial Sequence: Synthetic oligonucleotide
  Target: SCNA; (+) strand; PAM type: YTN; PAM sequence: TTT
gaaacaatttactaaggaaa

SEQ ID NO: 80879 - DNA, 20 bp, Artificial Sequence
  Description of Artificial Sequence: Synthetic oligonucleotide
  Target: SCNA; (+) strand; PAM type: YTN; PAM sequence: TTG
aaacaatttactaaggaaat

SEQ ID NO: 80880 - DNA, 20 bp, Artificial Sequence
  Description of Artificial Sequence: Synthetic oligonucleotide
  Target: SCNA; (+) strand; PAM type: YTN; PAM sequence: TTT
actaaggaaatttaaatcat

SEQ ID NO: 80881 - DNA, 20 bp, Artificial Sequence
  Description of Artificial Sequence: Synthetic oligonucleotide
  Target: SCNA; (+) strand; PAM type: YTN; PAM sequence: TTA
ctaaggaaatttaaatcata

SEQ ID NO: 80882 - DNA, 20 bp, Artificial Sequence
  Description of Artificial Sequence: Synthetic oligonucleotide
  Target: SCNA; (+) strand; PAM type: YTN; PAM sequence: CTA
aggaaatttaaatcataata

SEQ ID NO: 80883 - DNA, 20 bp, Artificial Sequence
  Description of Artificial Sequence: Synthetic oligonucleotide
  Target: SCNA; (+) strand; PAM type: YTN; PAM sequence: TTT
aaatcataatatgttgaaaa

SEQ ID NO: 80884 - DNA, 20 bp, Artificial Sequence
  Description of Artificial Sequence: Synthetic oligonucleotide
  Target: SCNA; (+) strand; PAM type: YTN; PAM sequence: TTA
aatcataatatgttgaaaat

SEQ ID NO: 80885 - DNA, 20 bp, Artificial Sequence
  Description of Artificial Sequence: Synthetic oligonucleotide
  Target: SCNA; (+) strand; PAM type: YTN; PAM sequence: TTG
aaaattagttttgttcatta

SEQ ID NO: 80886 - DNA, 20 bp, Artificial Sequence
  Description of Artificial Sequence: Synthetic oligonucleotide
  Target: SCNA; (+) strand; PAM type: YTN; PAM sequence: TTA
gttttgttcattatgatgta

SEQ ID NO: 80887 - DNA, 20 bp, Artificial Sequence
  Description of Artificial Sequence: Synthetic oligonucleotide
  Target: SCNA; (+) strand; PAM type: YTN; PAM sequence: TTT
tgttcattatgatgtaataa

SEQ ID NO: 80888 - DNA, 20 bp, Artificial Sequence
  Description of Artificial Sequence: Synthetic oligonucleotide
  Target: SCNA; (+) strand; PAM type: YTN; PAM sequence: TTT
gttcattatgatgtaataaa

SEQ ID NO: 80889 - DNA, 20 bp, Artificial Sequence
  Description of Artificial Sequence: Synthetic oligonucleotide
  Target: SCNA; (+) strand; PAM type: YTN; PAM sequence: TTG
ttcattatgatgtaataaat

SEQ ID NO: 80890 - DNA, 20 bp, Artificial Sequence
  Description of Artificial Sequence: Synthetic oligonucleotide
  Target: SCNA; (+) strand; PAM type: YTN; PAM sequence: TTC
attatgatgtaataaattta

SEQ ID NO: 80891 - DNA, 20 bp, Artificial Sequence
  Description of Artificial Sequence: Synthetic oligonucleotide
  Target: SCNA; (+) strand; PAM type: YTN; PAM sequence: TTA
tgatgtaataaatttataag

SEQ ID NO: 80892 - DNA, 20 bp, Artificial Sequence
  Description of Artificial Sequence: Synthetic oligonucleotide
  Target: SCNA; (+) strand; PAM type: YTN; PAM sequence: TTT
ataagaatcaaaaccttcag

SEQ ID NO: 80893 - DNA, 20 bp, Artificial Sequence
  Description of Artificial Sequence: Synthetic oligonucleotide
  Target: SCNA; (+) strand; PAM type: YTN; PAM sequence: TTA
taagaatcaaaaccttcaga

SEQ ID NO: 80894 - DNA, 20 bp, Artificial Sequence
  Description of Artificial Sequence: Synthetic oligonucleotide
  Target: SCNA; (+) strand; PAM type: YTN; PAM sequence: CTT
cagaaaatctccagtgttag

SEQ ID NO: 80895 - DNA, 20 bp, Artificial Sequence
  Description of Artificial Sequence: Synthetic oligonucleotide
  Target: SCNA; (+) strand; PAM type: YTN; PAM sequence: TTC
agaaaatctccagtgttaga

SEQ ID NO: 80896 - DNA, 20 bp, Artificial Sequence
  Description of Artificial Sequence: Synthetic oligonucleotide
  Target: SCNA; (+) strand; PAM type: YTN; PAM sequence: CTC
cagtgttagaaatttcttta

SEQ ID NO: 80897 - DNA, 20 bp, Artificial Sequence
  Description of Artificial Sequence: Synthetic oligonucleotide
  Target: SCNA; (+) strand; PAM type: YTN; PAM sequence: TTA
gaaatttctttatactatac

SEQ ID NO: 80898 - DNA, 20 bp, Artificial Sequence
  Description of Artificial Sequence: Synthetic oligonucleotide
  Target: SCNA; (+) strand; PAM type: YTN; PAM sequence: TTT
ctttatactatacttgcatg

SEQ ID NO: 80899 - DNA, 20 bp, Artificial Sequence
  Description of Artificial Sequence: Synthetic oligonucleotide
  Target: SCNA; (+) strand; PAM type: YTN; PAM sequence: TTC
tttatactatacttgcatga

SEQ ID NO: 80900 - DNA, 20 bp, Artificial Sequence
  Description of Artificial Sequence: Synthetic oligonucleotide
  Target: SCNA; (+) strand; PAM type: YTN; PAM sequence: CTT
tatactatacttgcatgaaa

SEQ ID NO: 80901 - DNA, 20 bp, Artificial Sequence
  Description of Artificial Sequence: Synthetic oligonucleotide
  Target: SCNA; (+) strand; PAM type: YTN; PAM sequence: TTT
atactatacttgcatgaaaa

SEQ ID NO: 80902 - DNA, 20 bp, Artificial Sequence
  Description of Artificial Sequence: Synthetic oligonucleotide
  Target: SCNA; (+) strand; PAM type: YTN; PAM sequence: TTA
tactatacttgcatgaaaaa

SEQ ID NO: 80903 - DNA, 20 bp, Artificial Sequence
  Description of Artificial Sequence: Synthetic oligonucleotide
  Target: SCNA; (+) strand; PAM type: YTN; PAM sequence: CTA
tacttgcatgaaaaataggt

SEQ ID NO: 80904 - DNA, 20 bp, Artificial Sequence
  Description of Artificial Sequence: Synthetic oligonucleotide
  Target: SCNA; (+) strand; PAM type: YTN; PAM sequence: CTT
gcatgaaaaataggtaactt

SEQ ID NO: 80905 - DNA, 20 bp, Artificial Sequence
  Description of Artificial Sequence: Synthetic oligonucleotide
  Target: SCNA; (+) strand; PAM type: YTN; PAM sequence: TTG
catgaaaaataggtaacttt

SEQ ID NO: 80906 - DNA, 20 bp, Artificial Sequence
  Description of Artificial Sequence: Synthetic oligonucleotide
  Target: SCNA; (+) strand; PAM type: YTN; PAM sequence: CTT
tatatcatagtttattttta

SEQ ID NO: 80907 - DNA, 20 bp, Artificial Sequence
  Description of Artificial Sequence: Synthetic oligonucleotide
  Target: SCNA; (+) strand; PAM type: YTN; PAM sequence: TTT
atatcatagtttatttttaa

SEQ ID NO: 80908 - DNA, 20 bp, Artificial Sequence
  Description of Artificial Sequence: Synthetic oligonucleotide
  Target: SCNA; (+) strand; PAM type: YTN; PAM sequence: TTA
tatcatagtttatttttaaa

SEQ ID NO: 80909 - DNA, 20 bp, Artificial Sequence
  Description of Artificial Sequence: Synthetic oligonucleotide
  Target: SCNA; (+) strand; PAM type: YTN; PAM sequence: TTT
atttttaaagtacctgaaaa

SEQ ID NO: 80910 - DNA, 20 bp, Artificial Sequence
  Description of Artificial Sequence: Synthetic oligonucleotide
  Target: SCNA; (+) strand; PAM type: YTN; PAM sequence: TTA
tttttaaagtacctgaaaaa

SEQ ID NO: 80911 - DNA, 20 bp, Artificial Sequence
  Description of Artificial Sequence: Synthetic oligonucleotide
  Target: SCNA; (+) strand; PAM type: YTN; PAM sequence: TTT
ttaaagtacctgaaaaaaca

SEQ ID NO: 80912 - DNA, 20 bp, Artificial Sequence
  Description of Artificial Sequence: Synthetic oligonucleotide
  Target: SCNA; (+) strand; PAM type: YTN; PAM sequence: TTT
taaagtacctgaaaaaacat

SEQ ID NO: 80913 - DNA, 20 bp, Artificial Sequence
  Description of Artificial Sequence: Synthetic oligonucleotide
  Target: SCNA; (+) strand; PAM type: YTN; PAM sequence: TTT
aaagtacctgaaaaaacata

SEQ ID NO: 80914 - DNA, 20 bp, Artificial Sequence
  Description of Artificial Sequence: Synthetic oligonucleotide
  Target: SCNA; (+) strand; PAM type: YTN; PAM sequence: TTA
aagtacctgaaaaaacatat

SEQ ID NO: 80915 - DNA, 20 bp, Artificial Sequence
  Description of Artificial Sequence: Synthetic oligonucleotide
  Target: SCNA; (+) strand; PAM type: YTN; PAM sequence: CTG
aaaaaacatatcattcagta

SEQ ID NO: 80916 - DNA, 20 bp, Artificial Sequence
  Description of Artificial Sequence: Synthetic oligonucleotide
  Target: SCNA; (+) strand; PAM type: YTN; PAM sequence: TTC
agtaagtttaattaaacaca

SEQ ID NO: 80917 - DNA, 20 bp, Artificial Sequence
  Description of Artificial Sequence: Synthetic oligonucleotide
  Target: SCNA; (+) strand; PAM type: YTN; PAM sequence: TTT
aattaaacacattttcatat

SEQ ID NO: 80918 - DNA, 20 bp, Artificial Sequence
  Description of Artificial Sequence: Synthetic oligonucleotide
  Target: SCNA; (+) strand; PAM type: YTN; PAM sequence: TTA
attaaacacattttcatata

SEQ ID NO: 80919 - DNA, 20 bp, Artificial Sequence
  Description of Artificial Sequence: Synthetic oligonucleotide
  Target: SCNA; (+) strand; PAM type: YTN; PAM sequence: TTA
aacacattttcatatatttc

SEQ ID NO: 80920 - DNA, 20 bp, Artificial Sequence
  Description of Artificial Sequence: Synthetic oligonucleotide
  Target: SCNA; (+) strand; PAM type: YTN; PAM sequence: TTT
tcatatatttctataatatg

SEQ ID NO: 80921 - DNA, 20 bp, Artificial Sequence
  Description of Artificial Sequence: Synthetic oligonucleotide
  Target: SCNA; (+) strand; PAM type: YTN; PAM sequence: TTT
catatatttctataatatga

SEQ ID NO: 80922 - DNA, 20 bp, Artificial Sequence
  Description of Artificial Sequence: Synthetic oligonucleotide
  Target: SCNA; (+) strand; PAM type: YTN; PAM sequence: TTC
atatatttctataatatgat

SEQ ID NO: 80923 - DNA, 20 bp, Artificial Sequence
  Description of Artificial Sequence: Synthetic oligonucleotide
  Target: SCNA; (+) strand; PAM type: YTN; PAM sequence: TTT
ctataatatgatgcattaag

SEQ ID NO: 80924 - DNA, 20 bp, Artificial Sequence
  Description of Artificial Sequence: Synthetic oligonucleotide
  Target: SCNA; (+) strand; PAM type: YTN; PAM sequence: TTC
tataatatgatgcattaagt

SEQ ID NO: 80925 - DNA, 20 bp, Artificial Sequence
  Description of Artificial Sequence: Synthetic oligonucleotide
  Target: SCNA; (+) strand; PAM type: YTN; PAM sequence: CTA
taatatgatgcattaagttg

SEQ ID NO: 80926 - DNA, 20 bp, Artificial Sequence
  Description of Artificial Sequence: Synthetic oligonucleotide
  Target: SCNA; (+) strand; PAM type: YTN; PAM sequence: TTA
agttgataactgaaataatt

SEQ ID NO: 80927 - DNA, 20 bp, Artificial Sequence
  Description of Artificial Sequence: Synthetic oligonucleotide
  Target: SCNA; (+) strand; PAM type: YTN; PAM sequence: TTG
ataactgaaataatttcctg

SEQ ID NO: 80928 - DNA, 20 bp, Artificial Sequence
  Description of Artificial Sequence: Synthetic oligonucleotide
  Target: SCNA; (+) strand; PAM type: YTN; PAM sequence: CTG
aaataatttcctgagatcaa

SEQ ID NO: 80929 - DNA, 20 bp, Artificial Sequence
  Description of Artificial Sequence: Synthetic oligonucleotide
  Target: SCNA; (+) strand; PAM type: YTN; PAM sequence: TTT
cctgagatcaaacagccagg

SEQ ID NO: 80930 - DNA, 20 bp, Artificial Sequence
  Description of Artificial Sequence: Synthetic oligonucleotide
  Target: SCNA; (+) strand; PAM type: YTN; PAM sequence: TTC
ctgagatcaaacagccagga

SEQ ID NO: 80931 - DNA, 20 bp, Artificial Sequence
  Description of Artificial Sequence: Synthetic oligonucleotide
  Target: SCNA; (+) strand; PAM type: YTN; PAM sequence: CTG
agatcaaacagccaggattt

SEQ ID NO: 80932 - DNA, 20 bp, Artificial Sequence
  Description of Artificial Sequence: Synthetic oligonucleotide
  Target: SCNA; (+) strand; PAM type: YTN; PAM sequence: TTT
aagttggtggatttttcatt

SEQ ID NO: 80933 - DNA, 20 bp, Artificial Sequence
  Description of Artificial Sequence: Synthetic oligonucleotide
  Target: SCNA; (+) strand; PAM type: YTN; PAM sequence: TTA
agttggtggatttttcattg

SEQ ID NO: 80934 - DNA, 20 bp, Artificial Sequence
  Description of Artificial Sequence: Synthetic oligonucleotide
  Target: SCNA; (+) strand; PAM type: YTN; PAM sequence: TTG
gtggatttttcattgatatt

SEQ ID NO: 80935 - DNA, 20 bp, Artificial Sequence
  Description of Artificial Sequence: Synthetic oligonucleotide
  Target: SCNA; (+) strand; PAM type: YTN; PAM sequence: TTT
ttcattgatattatctaact

SEQ ID NO: 80936 - DNA, 20 bp, Artificial Sequence
  Description of Artificial Sequence: Synthetic oligonucleotide
  Target: SCNA; (+) strand; PAM type: YTN; PAM sequence: TTT
tcattgatattatctaacta

SEQ ID NO: 80937 - DNA, 20 bp, Artificial Sequence
  Description of Artificial Sequence: Synthetic oligonucleotide
  Target: SCNA; (+) strand; PAM type: YTN; PAM sequence: TTT
cattgatattatctaactag

SEQ ID NO: 80938 - DNA, 20 bp, Artificial Sequence
  Description of Artificial Sequence: Synthetic oligonucleotide
  Target: SCNA; (+) strand; PAM type: YTN; PAM sequence: TTC
attgatattatctaactagg

SEQ ID NO: 80939 - DNA, 20 bp, Artificial Sequence
  Description of Artificial Sequence: Synthetic oligonucleotide
  Target: SCNA; (+) strand; PAM type: YTN; PAM sequence: TTG
atattatctaactaggataa

SEQ ID NO: 80940 - DNA, 20 bp, Artificial Sequence
  Description of Artificial Sequence: Synthetic oligonucleotide
  Target: SCNA; (+) strand; PAM type: YTN; PAM sequence: TTA
tctaactaggataatttatt

SEQ ID NO: 80941 - DNA, 20 bp, Artificial Sequence
  Description of Artificial Sequence: Synthetic oligonucleotide
  Target: SCNA; (+) strand; PAM type: YTN; PAM sequence: CTA
actaggataatttattttat

SEQ ID NO: 80942 - DNA, 20 bp, Artificial Sequence
  Description of Artificial Sequence: Synthetic oligonucleotide
  Target: SCNA; (+) strand; PAM type: YTN; PAM sequence: CTA
ggataatttattttatttga

SEQ ID NO: 80943 - DNA, 20 bp, Artificial Sequence
  Description of Artificial Sequence: Synthetic oligonucleotide
  Target: SCNA; (+) strand; PAM type: YTN; PAM sequence: TTT
attttatttgaactttgtag

SEQ ID NO: 80944 - DNA, 20 bp, Artificial Sequence
  Description of Artificial Sequence: Synthetic oligonucleotide
  Target: SCNA; (+) strand; PAM type: YTN; PAM sequence: TTA
ttttatttgaactttgtagg

SEQ ID NO: 80945 - DNA, 20 bp, Artificial Sequence
  Description of Artificial Sequence: Synthetic oligonucleotide
  Target: SCNA; (+) strand; PAM type: YTN; PAM sequence: TTT
tatttgaactttgtaggtag

SEQ ID NO: 80946 - DNA, 20 bp, Artificial Sequence
  Description of Artificial Sequence: Synthetic oligonucleotide
  Target: SCNA; (+) strand; PAM type: YTN; PAM sequence: TTT
atttgaactttgtaggtaga

SEQ ID NO: 80947 - DNA, 20 bp, Artificial Sequence
  Description of Artificial Sequence: Synthetic oligonucleotide
  Target: SCNA; (+) strand; PAM type: YTN; PAM sequence: TTA
tttgaactttgtaggtagaa

SEQ ID NO: 80948 - DNA, 20 bp, Artificial Sequence
  Description of Artificial Sequence: Synthetic oligonucleotide
  Target: SCNA; (+) strand; PAM type: YTN; PAM sequence: TTT
gaactttgtaggtagaaagt

SEQ ID NO: 80949 - DNA, 20 bp, Artificial Sequence
  Description of Artificial Sequence: Synthetic oligonucleotide
  Target: SCNA; (+) strand; PAM type: YTN; PAM sequence: TTG
aactttgtaggtagaaagtt

SEQ ID NO: 80950 - DNA, 20 bp, Artificial Sequence
  Description of Artificial Sequence: Synthetic oligonucleotide
  Target: SCNA; (+) strand; PAM type: YTN; PAM sequence: CTT
tgtaggtagaaagttcccag

SEQ ID NO: 80951 - DNA, 20 bp, Artificial Sequence
  Description of Artificial Sequence: Synthetic oligonucleotide
  Target: SCNA; (+) strand; PAM type: YTN; PAM sequence: TTT
gtaggtagaaagttcccagc

SEQ ID NO: 80952 - DNA, 20 bp, Artificial Sequence
  Description of Artificial Sequence: Synthetic oligonucleotide
  Target: SCNA; (+) strand; PAM type: YTN; PAM sequence: TTG
taggtagaaagttcccagcc

SEQ ID NO: 80953 - DNA, 20 bp, Artificial Sequence
  Description of Artificial Sequence: Synthetic oligonucleotide
  Target: SCNA; (+) strand; PAM type: YTN; PAM sequence: TTC
ccagcccaagtttactgaag

SEQ ID NO: 80954 - DNA, 20 bp, Artificial Sequence
  Description of Artificial Sequence: Synthetic oligonucleotide
  Target: SCNA; (+) strand; PAM type: YTN; PAM sequence: TTT
actgaagtctgtatttctcc

SEQ ID NO: 80955 - DNA, 20 bp, Artificial Sequence
  Description of Artificial Sequence: Synthetic oligonucleotide
  Target: SCNA; (+) strand; PAM type: YTN; PAM sequence: TTA
ctgaagtctgtatttctccc

SEQ ID NO: 80956 - DNA, 20 bp, Artificial Sequence
  Description of Artificial Sequence: Synthetic oligonucleotide
  Target: SCNA; (+) strand; PAM type: YTN; PAM sequence: CTG
aagtctgtatttctcccctg

SEQ ID NO: 80957 - DNA, 20 bp, Artificial Sequence
  Description of Artificial Sequence: Synthetic oligonucleotide
  Target: SCNA; (+) strand; PAM type: YTN; PAM sequence: CTG
tatttctcccctgccccacc

SEQ ID NO: 80958 - DNA, 20 bp, Artificial Sequence
  Description of Artificial Sequence: Synthetic oligonucleotide
  Target: SCNA; (+) strand; PAM type: YTN; PAM sequence: TTT
ctcccctgccccaccgaaaa

SEQ ID NO: 80959 - DNA, 20 bp, Artificial Sequence
  Description of Artificial Sequence: Synthetic oligonucleotide
  Target: SCNA; (+) strand; PAM type: YTN; PAM sequence: TTC
tcccctgccccaccgaaaaa

SEQ ID NO: 80960 - DNA, 20 bp, Artificial Sequence
  Description of Artificial Sequence: Synthetic oligonucleotide
  Target: SCNA; (+) strand; PAM type: YTN; PAM sequence: CTC
ccctgccccaccgaaaaaaa

SEQ ID NO: 80961 - DNA, 20 bp, Artificial Sequence
  Description of Artificial Sequence: Synthetic oligonucleotide
  Target: SCNA; (+) strand; PAM type: YTN; PAM sequence: CTG
ccccaccgaaaaaaaaaaag

SEQ ID NO: 80962 - DNA, 20 bp, Artificial Sequence
  Description of Artificial Sequence: Synthetic oligonucleotide
  Target: SCNA; (+) strand; PAM type: YTN; PAM sequence: CTA
atgggatgaatttaggggaa

SEQ ID NO: 80963 - DNA, 20 bp, Artificial Sequence
  Description of Artificial Sequence: Synthetic oligonucleotide
  Target: SCNA; (+) strand; PAM type: YTN; PAM sequence: TTT
aggggaaattgtttctttaa

SEQ ID NO: 80964 - DNA, 20 bp, Artificial Sequence
  Description of Artificial Sequence: Synthetic oligonucleotide
  Target: SCNA; (+) strand; PAM type: YTN; PAM sequence: TTA
ggggaaattgtttctttaat

SEQ ID NO: 80965 - DNA, 20 bp, Artificial Sequence
  Description of Artificial Sequence: Synthetic oligonucleotide
  Target: SCNA; (+) strand; PAM type: YTN; PAM sequence: TTG
tttctttaatattagaagat

SEQ ID NO: 80966 - DNA, 20 bp, Artificial Sequence
  Description of Artificial Sequence: Synthetic oligonucleotide
  Target: SCNA; (+) strand; PAM type: YTN; PAM sequence: TTT
ctttaatattagaagataat

SEQ ID NO: 80967 - DNA, 20 bp, Artificial Sequence
  Description of Artificial Sequence: Synthetic oligonucleotide
  Target: SCNA; (+) strand; PAM type: YTN; PAM sequence: TTC
tttaatattagaagataata

SEQ ID NO: 80968 - DNA, 20 bp, Artificial Sequence
  Description of Artificial Sequence: Synthetic oligonucleotide
  Target: SCNA; (+) strand; PAM type: YTN; PAM sequence: CTT
taatattagaagataatatt

SEQ ID NO: 80969 - DNA, 20 bp, Artificial Sequence
  Description of Artificial Sequence: Synthetic oligonucleotide
  Target: SCNA; (+) strand; PAM type: YTN; PAM sequence: TTT
aatattagaagataatatta

SEQ ID NO: 80970 - DNA, 20 bp, Artificial Sequence
  Description of Artificial Sequence: Synthetic oligonucleotide
  Target: SCNA; (+) strand; PAM type: YTN; PAM sequence: TTA
atattagaagataatattag

SEQ ID NO: 80971 - DNA, 20 bp, Artificial Sequence
  Description of Artificial Sequence: Synthetic oligonucleotide
  Target: SCNA; (+) strand; PAM type: YTN; PAM sequence: TTA
gaagataatattaggtacta

SEQ ID NO: 80972 - DNA, 20 bp, Artificial Sequence
  Description of Artificial Sequence: Synthetic oligonucleotide
  Target: SCNA; (+) strand; PAM type: YTN; PAM sequence: TTA
ggtactatgtaataatttct

SEQ ID NO: 80973 - DNA, 20 bp, Artificial Sequence
  Description of Artificial Sequence: Synthetic oligonucleotide
  Target: SCNA; (+) strand; PAM type: YTN; PAM sequence: CTA
tgtaataatttcttgtttcc

SEQ ID NO: 80974 - DNA, 20 bp, Artificial Sequence
  Description of Artificial Sequence: Synthetic oligonucleotide
  Target: SCNA; (+) strand; PAM type: YTN; PAM sequence: TTT
cttgtttccctgcattaaga

SEQ ID NO: 80975 - DNA, 20 bp, Artificial Sequence
  Description of Artificial Sequence: Synthetic oligonucleotide
  Target: SCNA; (+) strand; PAM type: YTN; PAM sequence: TTC
ttgtttccctgcattaagac

SEQ ID NO: 80976 - DNA, 20 bp, Artificial Sequence
  Description of Artificial Sequence: Synthetic oligonucleotide
  Target: SCNA; (+) strand; PAM type: YTN; PAM sequence: CTT
gtttccctgcattaagactt

SEQ ID NO: 80977 - DNA, 20 bp, Artificial Sequence
  Description of Artificial Sequence: Synthetic oligonucleotide
  Target: SCNA; (+) strand; PAM type: YTN; PAM sequence: TTG
tttccctgcattaagacttg

SEQ ID NO: 80978 - DNA, 20 bp, Artificial Sequence
  Description of Artificial Sequence: Synthetic oligonucleotide
  Target: SCNA; (+) strand; PAM type: YTN; PAM sequence: TTT
ccctgcattaagacttgtag

SEQ ID NO: 80979 - DNA, 20 bp, Artificial Sequence
  Description of Artificial Sequence: Synthetic oligonucleotide
  Target: SCNA; (+) strand; PAM type: YTN; PAM sequence: TTC
cctgcattaagacttgtagc

SEQ ID NO: 80980 - DNA, 20 bp, Artificial Sequence
  Description of Artificial Sequence: Synthetic oligonucleotide
  Target: SCNA; (+) strand; PAM type: YTN; PAM sequence: CTG
cattaagacttgtagcaaga

SEQ ID NO: 80981 - DNA, 20 bp, Artificial Sequence
  Description of Artificial Sequence: Synthetic oligonucleotide
  Target: SCNA; (+) strand; PAM type: YTN; PAM sequence: TTA
agacttgtagcaagaacaat

SEQ ID NO: 80982 - DNA, 20 bp, Artificial Sequence
  Description of Artificial Sequence: Synthetic oligonucleotide
  Target: SCNA; (+) strand; PAM type: YTN; PAM sequence: CTT
gtagcaagaacaattaacaa

SEQ ID NO: 80983 - DNA, 20 bp, Artificial Sequence
  Description of Artificial Sequence: Synthetic oligonucleotide
  Target: SCNA; (+) strand; PAM type: YTN; PAM sequence: TTG
tagcaagaacaattaacaat

SEQ ID NO: 80984 - DNA, 20 bp, Artificial Sequence
  Description of Artificial Sequence: Synthetic oligonucleotide
  Target: SCNA; (+) strand; PAM type: YTN; PAM sequence: TTA
acaattagttagcacttaat

SEQ ID NO: 80985 - DNA, 20 bp, Artificial Sequence
  Description of Artificial Sequence: Synthetic oligonucleotide
  Target: SCNA; (+) strand; PAM type: YTN; PAM sequence: TTA
gttagcacttaatatgtacc

SEQ ID NO: 80986 - DNA, 20 bp, Artificial Sequence
  Description of Artificial Sequence: Synthetic oligonucleotide
  Target: SCNA; (+) strand; PAM type: YTN; PAM sequence: TTA
gcacttaatatgtacccata

SEQ ID NO: 80987 - DNA, 20 bp, Artificial Sequence
  Description of Artificial Sequence: Synthetic oligonucleotide
  Target: SCNA; (+) strand; PAM type: YTN; PAM sequence: CTT
aatatgtacccataataaac

SEQ ID NO: 80988 - DNA, 20 bp, Artificial Sequence
  Description of Artificial Sequence: Synthetic oligonucleotide
  Target: SCNA; (+) strand; PAM type: YTN; PAM sequence: TTA
atatgtacccataataaaca

SEQ ID NO: 80989 - DNA, 20 bp, Artificial Sequence
  Description of Artificial Sequence: Synthetic oligonucleotide
  Target: SCNA; (+) strand; PAM type: YTN; PAM sequence: TTT
tacatcaggcataatatgca

SEQ ID NO: 80990 - DNA, 20 bp, Artificial Sequence
  Description of Artificial Sequence: Synthetic oligonucleotide
  Target: SCNA; (+) strand; PAM type: YTN; PAM sequence: TTT
acatcaggcataatatgcaa

SEQ ID NO: 80991 - DNA, 20 bp, Artificial Sequence
  Description of Artificial Sequence: Synthetic oligonucleotide
  Target: SCNA; (+) strand; PAM type: YTN; PAM sequence: TTA
catcaggcataatatgcaaa

SEQ ID NO: 80992 - DNA, 20 bp, Artificial Sequence
  Description of Artificial Sequence: Synthetic oligonucleotide
  Target: SCNA; (+) strand; PAM type: YTN; PAM sequence: TTA
ttctccctctctttaaccat

SEQ ID NO: 80993 - DNA, 20 bp, Artificial Sequence
  Description of Artificial Sequence: Synthetic oligonucleotide
  Target: SCNA; (+) strand; PAM type: YTN; PAM sequence: TTC
tccctctctttaaccattga

SEQ ID NO: 80994 - DNA, 20 bp, Artificial Sequence
  Description of Artificial Sequence: Synthetic oligonucleotide
  Target: SCNA; (+) strand; PAM type: YTN; PAM sequence: CTC
cctctctttaaccattgaag

SEQ ID NO: 80995 - DNA, 20 bp, Artificial Sequence
  Description of Artificial Sequence: Synthetic oligonucleotide
  Target: SCNA; (+) strand; PAM type: YTN; PAM sequence: CTC
tctttaaccattgaagtgta

SEQ ID NO: 80996 - DNA, 20 bp, Artificial Sequence
  Description of Artificial Sequence: Synthetic oligonucleotide
  Target: SCNA; (+) strand; PAM type: YTN; PAM sequence: CTC
tttaaccattgaagtgtaat

SEQ ID NO: 80997 - DNA, 20 bp, Artificial Sequence
  Description of Artificial Sequence: Synthetic oligonucleotide
  Target: SCNA; (+) strand; PAM type: YTN; PAM sequence: CTT
taaccattgaagtgtaatta

SEQ ID NO: 80998 - DNA, 20 bp, Artificial Sequence
  Description of Artificial Sequence: Synthetic oligonucleotide
  Target: SCNA; (+) strand; PAM type: YTN; PAM sequence: TTT
aaccattgaagtgtaattat

SEQ ID NO: 80999 - DNA, 20 bp, Artificial Sequence
  Description of Artificial Sequence: Synthetic oligonucleotide
  Target: SCNA; (+) strand; PAM type: YTN; PAM sequence: TTA
accattgaagtgtaattatc

SEQ ID NO: 81000 - DNA, 20 bp, Artificial Sequence
  Description of Artificial Sequence: Synthetic oligonucleotide
  Target: SCNA; (+) strand; PAM type: YTN; PAM sequence: TTG
aagtgtaattatcttatttc

SEQ ID NO: 81001 - DNA, 20 bp, Artificial Sequence
  Description of Artificial Sequence: Synthetic oligonucleotide
  Target: SCNA; (+) strand; PAM type: YTN; PAM sequence: TTA
tcttatttcttctcataatt

SEQ ID NO: 81002 - DNA, 20 bp, Artificial Sequence
  Description of Artificial Sequence: Synthetic oligonucleotide
  Target: SCNA; (+) strand; PAM type: YTN; PAM sequence: CTT
atttcttctcataattagac

SEQ ID NO: 81003 - DNA, 20 bp, Artificial Sequence
  Description of Artificial Sequence: Synthetic oligonucleotide
  Target: SCNA; (+) strand; PAM type: YTN; PAM sequence: TTA
tttcttctcataattagact

SEQ ID NO: 81004 - DNA, 20 bp, Artificial Sequence
  Description of Artificial Sequence: Synthetic oligonucleotide
  Target: SCNA; (+) strand; PAM type: YTN; PAM sequence: TTT
cttctcataattagacttaa

SEQ ID NO: 81005 - DNA, 20 bp, Artificial Sequence
  Description of Artificial Sequence: Synthetic oligonucleotide
  Target: SCNA; (+) strand; PAM type: YTN; PAM sequence: TTC
ttctcataattagacttaag

SEQ ID NO: 81006 - DNA, 20 bp, Artificial Sequence
  Description of Artificial Sequence: Synthetic oligonucleotide
  Target: SCNA; (+) strand; PAM type: YTN; PAM sequence: CTT
ctcataattagacttaagca

SEQ ID NO: 81007 - DNA, 20 bp, Artificial Sequence
  Description of Artificial Sequence: Synthetic oligonucleotide
  Target: SCNA; (+) strand; PAM type: YTN; PAM sequence: TTC
tcataattagacttaagcac

SEQ ID NO: 81008 - DNA, 20 bp, Artificial Sequence
  Description of Artificial Sequence: Synthetic oligonucleotide
  Target: SCNA; (+) strand; PAM type: YTN; PAM sequence: CTC
ataattagacttaagcactt

SEQ ID NO: 81009 - DNA, 20 bp, Artificial Sequence
  Description of Artificial Sequence: Synthetic oligonucleotide
  Target: SCNA; (+) strand; PAM type: YTN; PAM sequence: TTA
gacttaagcactttatatta

SEQ ID NO: 81010 - DNA, 20 bp, Artificial Sequence
  Description of Artificial Sequence: Synthetic oligonucleotide
  Target: SCNA; (+) strand; PAM type: YTN; PAM sequence: CTT
aagcactttatattaaataa

SEQ ID NO: 81011 - DNA, 20 bp, Artificial Sequence
  Description of Artificial Sequence: Synthetic oligonucleotide
  Target: SCNA; (+) strand; PAM type: YTN; PAM sequence: TTA
agcactttatattaaataac

SEQ ID NO: 81012 - DNA, 20 bp, Artificial Sequence
  Description of Artificial Sequence: Synthetic oligonucleotide
  Target: SCNA; (+) strand; PAM type: YTN; PAM sequence: CTT
tatattaaataaccctattc

SEQ ID NO: 81013 - DNA, 20 bp, Artificial Sequence
  Description of Artificial Sequence: Synthetic oligonucleotide
  Target: SCNA; (+) strand; PAM type: YTN; PAM sequence: TTT
atattaaataaccctattca

SEQ ID NO: 81014 - DNA, 20 bp, Artificial Sequence
  Description of Artificial Sequence: Synthetic oligonucleotide
  Target: SCNA; (+) strand; PAM type: YTN; PAM sequence: TTA
tattaaataaccctattcaa

SEQ ID NO: 81015 - DNA, 20 bp, Artificial Sequence
  Description of Artificial Sequence: Synthetic oligonucleotide
  Target: SCNA; (+) strand; PAM type: YTN; PAM sequence: TTA
aataaccctattcaaaaagt

SEQ ID NO: 81016 - DNA, 20 bp, Artificial Sequence
  Description of Artificial Sequence: Synthetic oligonucleotide
  Target: SCNA; (+) strand; PAM type: YTN; PAM sequence: CTA
ttcaaaaagttaattcattt

SEQ ID NO: 81017 - DNA, 20 bp, Artificial Sequence
  Description of Artificial Sequence: Synthetic oligonucleotide
  Target: SCNA; (+) strand; PAM type: YTN; PAM sequence: TTC
aaaaagttaattcatttatc

SEQ ID NO: 81018 - DNA, 20 bp, Artificial Sequence
  Description of Artificial Sequence: Synthetic oligonucleotide
  Target: SCNA; (+) strand; PAM type: YTN; PAM sequence: TTA
attcatttatctgatgtggg

SEQ ID NO: 81019 - DNA, 20 bp, Artificial Sequence
  Description of Artificial Sequence: Synthetic oligonucleotide
  Target: SCNA; (+) strand; PAM type: YTN; PAM sequence: TTC
atttatctgatgtgggagag

SEQ ID NO: 81020 - DNA, 20 bp, Artificial Sequence
  Description of Artificial Sequence: Synthetic oligonucleotide
  Target: SCNA; (+) strand; PAM type: YTN; PAM sequence: TTT
atctgatgtgggagaggaat

SEQ ID NO: 81021 - DNA, 20 bp, Artificial Sequence
  Description of Artificial Sequence: Synthetic oligonucleotide
  Target: SCNA; (+) strand; PAM type: YTN; PAM sequence: TTA
tctgatgtgggagaggaatg

SEQ ID NO: 81022 - DNA, 20 bp, Artificial Sequence
  Description of Artificial Sequence: Synthetic oligonucleotide
  Target: SCNA; (+) strand; PAM type: YTN; PAM sequence: CTG
atgtgggagaggaatgatta

SEQ ID NO: 81023 - DNA, 20 bp, Artificial Sequence
  Description of Artificial Sequence: Synthetic oligonucleotide
  Target: SCNA; (+) strand; PAM type: YTN; PAM sequence: TTA
tgatagcagccgatttatcc

SEQ ID NO: 81024 - DNA, 20 bp, Artificial Sequence
  Description of Artificial Sequence: Synthetic oligonucleotide
  Target: SCNA; (+) strand; PAM type: YTN; PAM sequence: TTT
atcccaatgtgtttctcata

SEQ ID NO: 81025 - DNA, 20 bp, Artificial Sequence
  Description of Artificial Sequence: Synthetic oligonucleotide
  Target: SCNA; (+) strand; PAM type: YTN; PAM sequence: TTA
tcccaatgtgtttctcatag

SEQ ID NO: 81026 - DNA, 20 bp, Artificial Sequence
  Description of Artificial Sequence: Synthetic oligonucleotide
  Target: SCNA; (+) strand; PAM type: YTN; PAM sequence: TTT
ctcatagccatactagttat

SEQ ID NO: 81027 - DNA, 20 bp, Artificial Sequence
  Description of Artificial Sequence: Synthetic oligonucleotide
  Target: SCNA; (+) strand; PAM type: YTN; PAM sequence: TTC
tcatagccatactagttatg

SEQ ID NO: 81028 - DNA, 20 bp, Artificial Sequence
  Description of Artificial Sequence: Synthetic oligonucleotide
  Target: SCNA; (+) strand; PAM type: YTN; PAM sequence: CTC
atagccatactagttatgac

SEQ ID NO: 81029 - DNA, 20 bp, Artificial Sequence
  Description of Artificial Sequence: Synthetic oligonucleotide
  Target: SCNA; (+) strand; PAM type: YTN; PAM sequence: CTA
gttatgacagcatttttggt

SEQ ID NO: 81030 - DNA, 20 bp, Artificial Sequence
  Description of Artificial Sequence: Synthetic oligonucleotide
  Target: SCNA; (+) strand; PAM type: YTN; PAM sequence: TTA
tgacagcatttttggttatt

SEQ ID NO: 81031 - DNA, 20 bp, Artificial Sequence
  Description of Artificial Sequence: Synthetic oligonucleotide
  Target: SCNA; (+) strand; PAM type: YTN; PAM sequence: TTT
ttggttatttcactactgcc

SEQ ID NO: 81032 - DNA, 20 bp, Artificial Sequence
  Description of Artificial Sequence: Synthetic oligonucleotide
  Target: SCNA; (+) strand; PAM type: YTN; PAM sequence: TTT
tggttatttcactactgcca

SEQ ID NO: 81033 - DNA, 20 bp, Artificial Sequence
  Description of Artificial Sequence: Synthetic oligonucleotide
  Target: SCNA; (+) strand; PAM type: YTN; PAM sequence: TTT
ggttatttcactactgccag

SEQ ID NO: 81034 - DNA, 20 bp, Artificial Sequence
  Description of Artificial Sequence: Synthetic oligonucleotide
  Target: SCNA; (+) strand; PAM type: YTN; PAM sequence: TTG
gttatttcactactgccagg

SEQ ID NO: 81035 - DNA, 20 bp, Artificial Sequence
  Description of Artificial Sequence: Synthetic oligonucleotide
  Target: SCNA; (+) strand; PAM type: YTN; PAM sequence: TTA
tttcactactgccagggtgg

SEQ ID NO: 81036 - DNA, 20 bp, Artificial Sequence
  Description of Artificial Sequence: Synthetic oligonucleotide
  Target: SCNA; (+) strand; PAM type: YTN; PAM sequence: TTT
cactactgccagggtggtcc

SEQ ID NO: 81037 - DNA, 20 bp, Artificial Sequence
  Description of Artificial Sequence: Synthetic oligonucleotide
  Target: SCNA; (+) strand; PAM type: YTN; PAM sequence: TTC
actactgccagggtggtcca

SEQ ID NO: 81038 - DNA, 20 bp, Artificial Sequence
  Description of Artificial Sequence: Synthetic oligonucleotide
  Target: SCNA; (+) strand; PAM type: YTN; PAM sequence: CTA
ctgccagggtggtccatggg

SEQ ID NO: 81039 - DNA, 20 bp, Artificial Sequence
  Description of Artificial Sequence: Synthetic oligonucleotide
  Target: SCNA; (+) strand; PAM type: YTN; PAM sequence: CTG
ccagggtggtccatgggtgc

SEQ ID NO: 81040 - DNA, 20 bp, Artificial Sequence
  Description of Artificial Sequence: Synthetic oligonucleotide
  Target: SCNA; (+) strand; PAM type: YTN; PAM sequence: CTG
taaatattgcacatgctgaa

SEQ ID NO: 81041 - DNA, 20 bp, Artificial Sequence
  Description of Artificial Sequence: Synthetic oligonucleotide
  Target: SCNA; (+) strand; PAM type: YTN; PAM sequence: TTG
cacatgctgaaatcaccatg

SEQ ID NO: 81042 - DNA, 20 bp, Artificial Sequence
  Description of Artificial Sequence: Synthetic oligonucleotide
  Target: SCNA; (+) strand; PAM type: YTN; PAM sequence: CTG
aaatcaccatgtccttactg

SEQ ID NO: 81043 - DNA, 20 bp, Artificial Sequence
  Description of Artificial Sequence: Synthetic oligonucleotide
  Target: SCNA; (+) strand; PAM type: YTN; PAM sequence: CTT
actgcctagcaacatttccc

SEQ ID NO: 81044 - DNA, 20 bp, Artificial Sequence
  Description of Artificial Sequence: Synthetic oligonucleotide
  Target: SCNA; (+) strand; PAM type: YTN; PAM sequence: TTA
ctgcctagcaacatttccca

SEQ ID NO: 81045 - DNA, 20 bp, Artificial Sequence
  Description of Artificial Sequence: Synthetic oligonucleotide
  Target: SCNA; (+) strand; PAM type: YTN; PAM sequence: CTG
cctagcaacatttcccatag

SEQ ID NO: 81046 - DNA, 20 bp, Artificial Sequence
  Description of Artificial Sequence: Synthetic oligonucleotide
  Target: SCNA; (+) strand; PAM type: YTN; PAM sequence: CTA
gcaacatttcccatagtttt

SEQ ID NO: 81047 - DNA, 20 bp, Artificial Sequence
  Description of Artificial Sequence: Synthetic oligonucleotide
  Target: SCNA; (+) strand; PAM type: YTN; PAM sequence: TTT
cccatagttttctgtggaac

SEQ ID NO: 81048 - DNA, 20 bp, Artificial Sequence
  Description of Artificial Sequence: Synthetic oligonucleotide
  Target: SCNA; (+) strand; PAM type: YTN; PAM sequence: TTC
ccatagttttctgtggaaca

SEQ ID NO: 81049 - DNA, 20 bp, Artificial Sequence
  Description of Artificial Sequence: Synthetic oligonucleotide
  Target: SCNA; (+) strand; PAM type: YTN; PAM sequence: TTT
tctgtggaacactagtttca

SEQ ID NO: 81050 - DNA, 20 bp, Artificial Sequence
  Description of Artificial Sequence: Synthetic oligonucleotide
  Target: SCNA; (+) strand; PAM type: YTN; PAM sequence: TTT
ctgtggaacactagtttcat

SEQ ID NO: 81051 - DNA, 20 bp, Artificial Sequence
  Description of Artificial Sequence: Synthetic oligonucleotide
  Target: SCNA; (+) strand; PAM type: YTN; PAM sequence: TTC
tgtggaacactagtttcatt

SEQ ID NO: 81052 - DNA, 20 bp, Artificial Sequence
  Description of Artificial Sequence: Synthetic oligonucleotide
  Target: SCNA; (+) strand; PAM type: YTN; PAM sequence: CTG
tggaacactagtttcattca

SEQ ID NO: 81053 - DNA, 20 bp, Artificial Sequence
  Description of Artificial Sequence: Synthetic oligonucleotide
  Target: SCNA; (+) strand; PAM type: YTN; PAM sequence: CTA
gtttcattcaaccctagtaa

SEQ ID NO: 81054 - DNA, 20 bp, Artificial Sequence
  Description of Artificial Sequence: Synthetic oligonucleotide
  Target: SCNA; (+) strand; PAM type: YTN; PAM sequence: TTT
cattcaaccctagtaactaa

SEQ ID NO: 81055 - DNA, 20 bp, Artificial Sequence
  Description of Artificial Sequence: Synthetic oligonucleotide
  Target: SCNA; (+) strand; PAM type: YTN; PAM sequence: TTC
attcaaccctagtaactaat

SEQ ID NO: 81056 - DNA, 20 bp, Artificial Sequence
  Description of Artificial Sequence: Synthetic oligonucleotide
  Target: SCNA; (+) strand; PAM type: YTN; PAM sequence: TTC
aaccctagtaactaatgaag

SEQ ID NO: 81057 - DNA, 20 bp, Artificial Sequence
  Description of Artificial Sequence: Synthetic oligonucleotide
  Target: SCNA; (+) strand; PAM type: YTN; PAM sequence: CTA
gtaactaatgaagaaagttt

SEQ ID NO: 81058 - DNA, 20 bp, Artificial Sequence
  Description of Artificial Sequence: Synthetic oligonucleotide
  Target: SCNA; (+) strand; PAM type: YTN; PAM sequence: CTA
atgaagaaagttttcaataa

SEQ ID NO: 81059 - DNA, 20 bp, Artificial Sequence
  Description of Artificial Sequence: Synthetic oligonucleotide
  Target: SCNA; (+) strand; PAM type: YTN; PAM sequence: TTT
tcaataatcaaaaagtttga

SEQ ID NO: 81060 - DNA, 20 bp, Artificial Sequence
  Description of Artificial Sequence: Synthetic oligonucleotide
  Target: SCNA; (+) strand; PAM type: YTN; PAM sequence: TTT
caataatcaaaaagtttgaa

SEQ ID NO: 81061 - DNA, 20 bp, Artificial Sequence
  Description of Artificial Sequence: Synthetic oligonucleotide
  Target: SCNA; (+) strand; PAM type: YTN; PAM sequence: TTC
aataatcaaaaagtttgaat

SEQ ID NO: 81062 - DNA, 20 bp, Artificial Sequence
  Description of Artificial Sequence: Synthetic oligonucleotide
  Target: SCNA; (+) strand; PAM type: YTN; PAM sequence: TTT
gaataaccctgattttaact

SEQ ID NO: 81063 - DNA, 20 bp, Artificial Sequence
  Description of Artificial Sequence: Synthetic oligonucleotide
  Target: SCNA; (+) strand; PAM type: YTN; PAM sequence: TTG
aataaccctgattttaacta

SEQ ID NO: 81064 - DNA, 20 bp, Artificial Sequence
  Description of Artificial Sequence: Synthetic oligonucleotide
  Target: SCNA; (+) strand; PAM type: YTN; PAM sequence: CTG
attttaactatgtaatgcaa

SEQ ID NO: 81065 - DNA, 20 bp, Artificial Sequence
  Description of Artificial Sequence: Synthetic oligonucleotide
  Target: SCNA; (+) strand; PAM type: YTN; PAM sequence: TTT
taactatgtaatgcaaattt

SEQ ID NO: 81066 - DNA, 20 bp, Artificial Sequence
  Description of Artificial Sequence: Synthetic oligonucleotide
  Target: SCNA; (+) strand; PAM type: YTN; PAM sequence: TTT
aactatgtaatgcaaatttc

SEQ ID NO: 81067 - DNA, 20 bp, Artificial Sequence
  Description of Artificial Sequence: Synthetic oligonucleotide
  Target: SCNA; (+) strand; PAM type: YTN; PAM sequence: TTA
actatgtaatgcaaatttct

SEQ ID NO: 81068 - DNA, 20 bp, Artificial Sequence
  Description of Artificial Sequence: Synthetic oligonucleotide
  Target: SCNA; (+) strand; PAM type: YTN; PAM sequence: CTA
tgtaatgcaaatttctttac

SEQ ID NO: 81069 - DNA, 20 bp, Artificial Sequence
  Description of Artificial Sequence: Synthetic oligonucleotide
  Target: SCNA; (+) strand; PAM type: YTN; PAM sequence: TTT
ctttactgtaggacatctca

SEQ ID NO: 81070 - DNA, 20 bp, Artificial Sequence
  Description of Artificial Sequence: Synthetic oligonucleotide
  Target: SCNA; (+) strand; PAM type: YTN; PAM sequence: TTC
tttactgtaggacatctcag

SEQ ID NO: 81071 - DNA, 20 bp, Artificial Sequence
  Description of Artificial Sequence: Synthetic oligonucleotide
  Target: SCNA; (+) strand; PAM type: YTN; PAM sequence: CTT
tactgtaggacatctcagat

SEQ ID NO: 81072 - DNA, 20 bp, Artificial Sequence
  Description of Artificial Sequence: Synthetic oligonucleotide
  Target: SCNA; (+) strand; PAM type: YTN; PAM sequence: TTT
actgtaggacatctcagatt

SEQ ID NO: 81073 - DNA, 20 bp, Artificial Sequence
  Description of Artificial Sequence: Synthetic oligonucleotide
  Target: SCNA; (+) strand; PAM type: YTN; PAM sequence: TTA
ctgtaggacatctcagattc

SEQ ID NO: 81074 - DNA, 20 bp, Artificial Sequence
  Description of Artificial Sequence: Synthetic oligonucleotide
  Target: SCNA; (+) strand; PAM type: YTN; PAM sequence: CTG
taggacatctcagattcctt

SEQ ID NO: 81075 - DNA, 20 bp, Artificial Sequence
  Description of Artificial Sequence: Synthetic oligonucleotide
  Target: SCNA; (+) strand; PAM type: YTN; PAM sequence: CTC
agattccttaatacgctaaa

SEQ ID NO: 81076 - DNA, 20 bp, Artificial Sequence
  Description of Artificial Sequence: Synthetic oligonucleotide
  Target: SCNA; (+) strand; PAM type: YTN; PAM sequence: TTC
cttaatacgctaaagagaaa

SEQ ID NO: 81077 - DNA, 20 bp, Artificial Sequence
  Description of Artificial Sequence: Synthetic oligonucleotide
  Target: SCNA; (+) strand; PAM type: YTN; PAM sequence: CTT
aatacgctaaagagaaaata

SEQ ID NO: 81078 - DNA, 20 bp, Artificial Sequence
  Description of Artificial Sequence: Synthetic oligonucleotide
  Target: SCNA; (+) strand; PAM type: YTN; PAM sequence: TTA
atacgctaaagagaaaataa

SEQ ID NO: 81079 - DNA, 20 bp, Artificial Sequence
  Description of Artificial Sequence: Synthetic oligonucleotide
  Target: SCNA; (+) strand; PAM type: YTN; PAM sequence: CTA
aagagaaaataaagtataca

SEQ ID NO: 81080 - DNA, 20 bp, Artificial Sequence
  Description of Artificial Sequence: Synthetic oligonucleotide
  Target: SCNA; (+) strand; PAM type: YTN; PAM sequence: CTC
ccaacattgtacaatgttag

SEQ ID NO: 81081 - DNA, 20 bp, Artificial Sequence
  Description of Artificial Sequence: Synthetic oligonucleotide
  Target: SCNA; (+) strand; PAM type: YTN; PAM sequence: TTG
tacaatgttagaaacttaag

SEQ ID NO: 81082 - DNA, 20 bp, Artificial Sequence
  Description of Artificial Sequence: Synthetic oligonucleotide
  Target: SCNA; (+) strand; PAM type: YTN; PAM sequence: TTA
gaaacttaagattgtgagcc

SEQ ID NO: 81083 - DNA, 20 bp, Artificial Sequence
  Description of Artificial Sequence: Synthetic oligonucleotide
  Target: SCNA; (+) strand; PAM type: YTN; PAM sequence: CTT
aagattgtgagccactgtcc

SEQ ID NO: 81084 - DNA, 20 bp, Artificial Sequence
  Description of Artificial Sequence: Synthetic oligonucleotide
  Target: SCNA; (+) strand; PAM type: YTN; PAM sequence: TTA
agattgtgagccactgtcct

SEQ ID NO: 81085 - DNA, 20 bp, Artificial Sequence
  Description of Artificial Sequence: Synthetic oligonucleotide
  Target: SCNA; (+) strand; PAM type: YTN; PAM sequence: TTG
tgagccactgtccttcagaa

SEQ ID NO: 81086 - DNA, 20 bp, Artificial Sequence
  Description of Artificial Sequence: Synthetic oligonucleotide
  Target: SCNA; (+) strand; PAM type: YTN; PAM sequence: CTG
tccttcagaaaacattttat

SEQ ID NO: 81087 - DNA, 20 bp, Artificial Sequence
  Description of Artificial Sequence: Synthetic oligonucleotide
  Target: SCNA; (+) strand; PAM type: YTN; PAM sequence: CTT
cagaaaacattttataaaat

SEQ ID NO: 81088 - DNA, 20 bp, Artificial Sequence
  Description of Artificial Sequence: Synthetic oligonucleotide
  Target: SCNA; (+) strand; PAM type: YTN; PAM sequence: TTC
agaaaacattttataaaatg

SEQ ID NO: 81089 - DNA, 20 bp, Artificial Sequence
  Description of Artificial Sequence: Synthetic oligonucleotide
  Target: SCNA; (+) strand; PAM type: YTN; PAM sequence: TTT
tataaaatgtctaattgtac

SEQ ID NO: 81090 - DNA, 20 bp, Artificial Sequence
  Description of Artificial Sequence: Synthetic oligonucleotide
  Target: SCNA; (+) strand; PAM type: YTN; PAM sequence: TTT
ataaaatgtctaattgtaca

SEQ ID NO: 81091 - DNA, 20 bp, Artificial Sequence
  Description of Artificial Sequence: Synthetic oligonucleotide
  Target: SCNA; (+) strand; PAM type: YTN; PAM sequence: TTA
taaaatgtctaattgtacaa

SEQ ID NO: 81092 - DNA, 20 bp, Artificial Sequence
  Description of Artificial Sequence: Synthetic oligonucleotide
  Target: SCNA; (+) strand; PAM type: YTN; PAM sequence: CTA
attgtacaaacttcagtctc

SEQ ID NO: 81093 - DNA, 20 bp, Artificial Sequence
  Description of Artificial Sequence: Synthetic oligonucleotide
  Target: SCNA; (+) strand; PAM type: YTN; PAM sequence: TTG
tacaaacttcagtctctctc

SEQ ID NO: 81094 - DNA, 20 bp, Artificial Sequence
  Description of Artificial Sequence: Synthetic oligonucleotide
  Target: SCNA; (+) strand; PAM type: YTN; PAM sequence: CTT
cagtctctctctctctctca

SEQ ID NO: 81095 - DNA, 20 bp, Artificial Sequence
  Description of Artificial Sequence: Synthetic oligonucleotide
  Target: SCNA; (+) strand; PAM type: YTN; PAM sequence: TTC
agtctctctctctctctcac

SEQ ID NO: 81096 - DNA, 20 bp, Artificial Sequence
  Description of Artificial Sequence: Synthetic oligonucleotide
  Target: SCNA; (+) strand; PAM type: YTN; PAM sequence: CTC
tctctctctctcacacacac

SEQ ID NO: 81097 - DNA, 20 bp, Artificial Sequence
  Description of Artificial Sequence: Synthetic oligonucleotide
  Target: SCNA; (+) strand; PAM type: YTN; PAM sequence: CTC
tctctctctcacacacacgc

SEQ ID NO: 81098 - DNA, 20 bp, Artificial Sequence
  Description of Artificial Sequence: Synthetic oligonucleotide
  Target: SCNA; (+) strand; PAM type: YTN; PAM sequence: CTC
tctctctcacacacacgcac

SEQ ID NO: 81099 - DNA, 20 bp, Artificial Sequence
  Description of Artificial Sequence: Synthetic oligonucleotide
  Target: SCNA; (+) strand; PAM type: YTN; PAM sequence: CTC
tctctcacacacacgcacac

SEQ ID NO: 81100 - DNA, 20 bp, Artificial Sequence
  Description of Artificial Sequence: Synthetic oligonucleotide
  Target: SCNA; (+) strand; PAM type: YTN; PAM sequence: CTC
tctcacacacacgcacacac

SEQ ID NO: 81101 - DNA, 20 bp, Artificial Sequence
  Description of Artificial Sequence: Synthetic oligonucleotide
  Target: SCNA; (+) strand; PAM type: YTN; PAM sequence: CTC
tcacacacacgcacacacac

SEQ ID NO: 81102 - DNA, 20 bp, Artificial Sequence
  Description of Artificial Sequence: Synthetic oligonucleotide
  Target: SCNA; (+) strand; PAM type: YTN; PAM sequence: CTC
acacacacgcacacacacac

SEQ ID NO: 81103 - DNA, 20 bp, Artificial Sequence
  Description of Artificial Sequence: Synthetic oligonucleotide
  Target: SCNA; (+) strand; PAM type: YTN; PAM sequence: TTT
acattttggcattctggaaa

SEQ ID NO: 81104 - DNA, 20 bp, Artificial Sequence
  Description of Artificial Sequence: Synthetic oligonucleotide
  Target: SCNA; (+) strand; PAM type: YTN; PAM sequence: TTA
cattttggcattctggaaaa

SEQ ID NO: 81105 - DNA, 20 bp, Artificial Sequence
  Description of Artificial Sequence: Synthetic oligonucleotide
  Target: SCNA; (+) strand; PAM type: YTN; PAM sequence: TTT
tggcattctggaaaagacta

SEQ ID NO: 81106 - DNA, 20 bp, Artificial Sequence
  Description of Artificial Sequence: Synthetic oligonucleotide
  Target: SCNA; (+) strand; PAM type: YTN; PAM sequence: TTT
ggcattctggaaaagactaa

SEQ ID NO: 81107 - DNA, 20 bp, Artificial Sequence
  Description of Artificial Sequence: Synthetic oligonucleotide
  Target: SCNA; (+) strand; PAM type: YTN; PAM sequence: TTG
gcattctggaaaagactaaa

SEQ ID NO: 81108 - DNA, 20 bp, Artificial Sequence
  Description of Artificial Sequence: Synthetic oligonucleotide
  Target: SCNA; (+) strand; PAM type: YTN; PAM sequence: TTC
tggaaaagactaaaaaaatg

SEQ ID NO: 81109 - DNA, 20 bp, Artificial Sequence
  Description of Artificial Sequence: Synthetic oligonucleotide
  Target: SCNA; (+) strand; PAM type: YTN; PAM sequence: CTG
gaaaagactaaaaaaatgca

SEQ ID NO: 81110 - DNA, 20 bp, Artificial Sequence
  Description of Artificial Sequence: Synthetic oligonucleotide
  Target: SCNA; (+) strand; PAM type: YTN; PAM sequence: CTA
aaaaaatgcagcccatctcc

SEQ ID NO: 81111 - DNA, 20 bp, Artificial Sequence
  Description of Artificial Sequence: Synthetic oligonucleotide
  Target: SCNA; (+) strand; PAM type: YTN; PAM sequence: CTC
cacagtctccattagatcat

SEQ ID NO: 81112 - DNA, 20 bp, Artificial Sequence
  Description of Artificial Sequence: Synthetic oligonucleotide
  Target: SCNA; (+) strand; PAM type: YTN; PAM sequence: CTC
cattagatcatcaggtgaca

SEQ ID NO: 81113 - DNA, 20 bp, Artificial Sequence
  Description of Artificial Sequence: Synthetic oligonucleotide
  Target: SCNA; (+) strand; PAM type: YTN; PAM sequence: TTA
gatcatcaggtgacagtaat

SEQ ID NO: 81114 - DNA, 20 bp, Artificial Sequence
  Description of Artificial Sequence: Synthetic oligonucleotide
  Target: SCNA; (+) strand; PAM type: YTN; PAM sequence: TTG
ggttctttaatttttaccac

SEQ ID NO: 81115 - DNA, 20 bp, Artificial Sequence
  Description of Artificial Sequence: Synthetic oligonucleotide
  Target: SCNA; (+) strand; PAM type: YTN; PAM sequence: TTC
tttaatttttaccactgact

SEQ ID NO: 81116 - DNA, 20 bp, Artificial Sequence
  Description of Artificial Sequence: Synthetic oligonucleotide
  Target: SCNA; (+) strand; PAM type: YTN; PAM sequence: CTT
taatttttaccactgactcc

SEQ ID NO: 81117 - DNA, 20 bp, Artificial Sequence
  Description of Artificial Sequence: Synthetic oligonucleotide
  Target: SCNA; (+) strand; PAM type: YTN; PAM sequence: TTT
aatttttaccactgactcca

SEQ ID NO: 81118 - DNA, 20 bp, Artificial Sequence
  Description of Artificial Sequence: Synthetic oligonucleotide
  Target: SCNA; (+) strand; PAM type: YTN; PAM sequence: TTA
atttttaccactgactccag

SEQ ID NO: 81119 - DNA, 20 bp, Artificial Sequence
  Description of Artificial Sequence: Synthetic oligonucleotide
  Target: SCNA; (+) strand; PAM type: YTN; PAM sequence: TTT
ttaccactgactccagaact

SEQ ID NO: 81120 - DNA, 20 bp, Artificial Sequence
  Description of Artificial Sequence: Synthetic oligonucleotide
  Target: SCNA; (+) strand; PAM type: YTN; PAM sequence: TTT
taccactgactccagaactt

SEQ ID NO: 81121 - DNA, 20 bp, Artificial Sequence
  Description of Artificial Sequence: Synthetic oligonucleotide
  Target: SCNA; (+) strand; PAM type: YTN; PAM sequence: TTT
accactgactccagaacttg

SEQ ID NO: 81122 - DNA, 20 bp, Artificial Sequence
  Description of Artificial Sequence: Synthetic oligonucleotide
  Target: SCNA; (+) strand; PAM type: YTN; PAM sequence: TTA
ccactgactccagaacttgc

SEQ ID NO: 81123 - DNA, 20 bp, Artificial Sequence
  Description of Artificial Sequence: Synthetic oligonucleotide
  Target: SCNA; (+) strand; PAM type: YTN; PAM sequence: CTG
actccagaacttgccacatg

SEQ ID NO: 81124 - DNA, 20 bp, Artificial Sequence
  Description of Artificial Sequence: Synthetic oligonucleotide
  Target: SCNA; (+) strand; PAM type: YTN; PAM sequence: CTC
cagaacttgccacatgcttg

SEQ ID NO: 81125 - DNA, 20 bp, Artificial Sequence
  Description of Artificial Sequence: Synthetic oligonucleotide
  Target: SCNA; (+) strand; PAM type: YTN; PAM sequence: CTT
gccacatgcttgtctgcttt

SEQ ID NO: 81126 - DNA, 20 bp, Artificial Sequence
  Description of Artificial Sequence: Synthetic oligonucleotide
  Target: SCNA; (+) strand; PAM type: YTN; PAM sequence: TTG
ccacatgcttgtctgctttc

SEQ ID NO: 81127 - DNA, 20 bp, Artificial Sequence
  Description of Artificial Sequence: Synthetic oligonucleotide
  Target: SCNA; (+) strand; PAM type: YTN; PAM sequence: CTT
gtctgctttctaaacctcat

SEQ ID NO: 81128 - DNA, 20 bp, Artificial Sequence
  Description of Artificial Sequence: Synthetic oligonucleotide
  Target: SCNA; (+) strand; PAM type: YTN; PAM sequence: TTG
tctgctttctaaacctcatg

SEQ ID NO: 81129 - DNA, 20 bp, Artificial Sequence
  Description of Artificial Sequence: Synthetic oligonucleotide
  Target: SCNA; (+) strand; PAM type: YTN; PAM sequence: CTG
ctttctaaacctcatgggtt

SEQ ID NO: 81130 - DNA, 20 bp, Artificial Sequence
  Description of Artificial Sequence: Synthetic oligonucleotide
  Target: SCNA; (+) strand; PAM type: YTN; PAM sequence: CTT
tctaaacctcatgggttctt

SEQ ID NO: 81131 - DNA, 20 bp, Artificial Sequence
  Description of Artificial Sequence: Synthetic oligonucleotide
  Target: SCNA; (+) strand; PAM type: YTN; PAM sequence: TTT
ctaaacctcatgggttcttc

SEQ ID NO: 81132 - DNA, 20 bp, Artificial Sequence
  Description of Artificial Sequence: Synthetic oligonucleotide
  Target: SCNA; (+) strand; PAM type: YTN; PAM sequence: TTC
taaacctcatgggttcttcc

SEQ ID NO: 81133 - DNA, 20 bp, Artificial Sequence
  Description of Artificial Sequence: Synthetic oligonucleotide
  Target: SCNA; (+) strand; PAM type: YTN; PAM sequence: CTA
aacctcatgggttcttcctc

SEQ ID NO: 81134 - DNA, 20 bp, Artificial Sequence
  Description of Artificial Sequence: Synthetic oligonucleotide
  Target: SCNA; (+) strand; PAM type: YTN; PAM sequence: CTC
atgggttcttcctcaactac

SEQ ID NO: 81135 - DNA, 20 bp, Artificial Sequence
  Description of Artificial Sequence: Synthetic oligonucleotide
  Target: SCNA; (+) strand; PAM type: YTN; PAM sequence: TTC
ttcctcaactactaaatgga

SEQ ID NO: 81136 - DNA, 20 bp, Artificial Sequence
  Description of Artificial Sequence: Synthetic oligonucleotide
  Target: SCNA; (+) strand; PAM type: YTN; PAM sequence: CTT
cctcaactactaaatggaac

SEQ ID NO: 81137 - DNA, 20 bp, Artificial Sequence
  Description of Artificial Sequence: Synthetic oligonucleotide
  Target: SCNA; (+) strand; PAM type: YTN; PAM sequence: TTC
ctcaactactaaatggaaca

SEQ ID NO: 81138 - DNA, 20 bp, Artificial Sequence
  Description of Artificial Sequence: Synthetic oligonucleotide
  Target: SCNA; (+) strand; PAM type: YTN; PAM sequence: CTC
aactactaaatggaacacca

SEQ ID NO: 81139 - DNA, 20 bp, Artificial Sequence
  Description of Artificial Sequence: Synthetic oligonucleotide
  Target: SCNA; (+) strand; PAM type: YTN; PAM sequence: CTA
ctaaatggaacaccattcat

SEQ ID NO: 81140 - DNA, 20 bp, Artificial Sequence
  Description of Artificial Sequence: Synthetic oligonucleotide
  Target: SCNA; (+) strand; PAM type: YTN; PAM sequence: CTA
aatggaacaccattcatcta

SEQ ID NO: 81141 - DNA, 20 bp, Artificial Sequence
  Description of Artificial Sequence: Synthetic oligonucleotide
  Target: SCNA; (+) strand; PAM type: YTN; PAM sequence: TTC
atctaggttgaccgtcttca

SEQ ID NO: 81142 - DNA, 20 bp, Artificial Sequence
  Description of Artificial Sequence: Synthetic oligonucleotide
  Target: SCNA; (+) strand; PAM type: YTN; PAM sequence: CTA
ggttgaccgtcttcagatag

SEQ ID NO: 81143 - DNA, 20 bp, Artificial Sequence
  Description of Artificial Sequence: Synthetic oligonucleotide
  Target: SCNA; (+) strand; PAM type: YTN; PAM sequence: TTG
accgtcttcagatagtggag

SEQ ID NO: 81144 - DNA, 20 bp, Artificial Sequence
  Description of Artificial Sequence: Synthetic oligonucleotide
  Target: SCNA; (+) strand; PAM type: YTN; PAM sequence: CTT
cagatagtggagtctccacc

SEQ ID NO: 81145 - DNA, 20 bp, Artificial Sequence
  Description of Artificial Sequence: Synthetic oligonucleotide
  Target: SCNA; (+) strand; PAM type: YTN; PAM sequence: TTC
agatagtggagtctccacct

SEQ ID NO: 81146 - DNA, 20 bp, Artificial Sequence
  Description of Artificial Sequence: Synthetic oligonucleotide
  Target: SCNA; (+) strand; PAM type: YTN; PAM sequence: CTC
cacctgtctgttatctagtt

SEQ ID NO: 81147 - DNA, 20 bp, Artificial Sequence
  Description of Artificial Sequence: Synthetic oligonucleotide
  Target: SCNA; (+) strand; PAM type: YTN; PAM sequence: CTG
tctgttatctagttcttatt

SEQ ID NO: 81148 - DNA, 20 bp, Artificial Sequence
  Description of Artificial Sequence: Synthetic oligonucleotide
  Target: SCNA; (+) strand; PAM type: YTN; PAM sequence: CTG
ttatctagttcttattataa

SEQ ID NO: 81149 - DNA, 20 bp, Artificial Sequence
  Description of Artificial Sequence: Synthetic oligonucleotide
  Target: SCNA; (+) strand; PAM type: YTN; PAM sequence: TTA
tctagttcttattataatca

SEQ ID NO: 81150 - DNA, 20 bp, Artificial Sequence
  Description of Artificial Sequence: Synthetic oligonucleotide
  Target: SCNA; (+) strand; PAM type: YTN; PAM sequence: CTA
gttcttattataatcatgct

SEQ ID NO: 81151 - DNA, 20 bp, Artificial Sequence
  Description of Artificial Sequence: Synthetic oligonucleotide
  Target: SCNA; (+) strand; PAM type: YTN; PAM sequence: TTC
ttattataatcatgcttcac

SEQ ID NO: 81152 - DNA, 20 bp, Artificial Sequence
  Description of Artificial Sequence: Synthetic oligonucleotide
  Target: SCNA; (+) strand; PAM type: YTN; PAM sequence: CTT
attataatcatgcttcacaa

SEQ ID NO: 81153 - DNA, 20 bp, Artificial Sequence
  Description of Artificial Sequence: Synthetic oligonucleotide
  Target: SCNA; (+) strand; PAM type: YTN; PAM sequence: TTA
ttataatcatgcttcacaat

SEQ ID NO: 81154 - DNA, 20 bp, Artificial Sequence
  Description of Artificial Sequence: Synthetic oligonucleotide
  Target: SCNA; (+) strand; PAM type: YTN; PAM sequence: TTA
taatcatgcttcacaatatc

SEQ ID NO: 81155 - DNA, 20 bp, Artificial Sequence
  Description of Artificial Sequence: Synthetic oligonucleotide
  Target: SCNA; (+) strand; PAM type: YTN; PAM sequence: CTT
cacaatatcatatttatagg

SEQ ID NO: 81156 - DNA, 20 bp, Artificial Sequence
  Description of Artificial Sequence: Synthetic oligonucleotide
  Target: SCNA; (+) strand; PAM type: YTN; PAM sequence: TTC
acaatatcatatttatagga

SEQ ID NO: 81157 - DNA, 20 bp, Artificial Sequence
  Description of Artificial Sequence: Synthetic oligonucleotide
  Target: SCNA; (+) strand; PAM type: YTN; PAM sequence: TTT
ataggaggtccctagaaggc

SEQ ID NO: 81158 - DNA, 20 bp, Artificial Sequence
  Description of Artificial Sequence: Synthetic oligonucleotide
  Target: SCNA; (+) strand; PAM type: YTN; PAM sequence: TTA
taggaggtccctagaaggca

SEQ ID NO: 81159 - DNA, 20 bp, Artificial Sequence
  Description of Artificial Sequence: Synthetic oligonucleotide
  Target: SCNA; (+) strand; PAM type: YTN; PAM sequence: CTA
gaaggcatcatagtccactt

SEQ ID NO: 81160 - DNA, 20 bp, Artificial Sequence
  Description of Artificial Sequence: Synthetic oligonucleotide
  Target: SCNA; (+) strand; PAM type: YTN; PAM sequence: CTT
acttaactacttctctgttg

SEQ ID NO: 81161 - DNA, 20 bp, Artificial Sequence
  Description of Artificial Sequence: Synthetic oligonucleotide
  Target: SCNA; (+) strand; PAM type: YTN; PAM sequence: TTA
cttaactacttctctgttgg

SEQ ID NO: 81162 - DNA, 20 bp, Artificial Sequence
  Description of Artificial Sequence: Synthetic oligonucleotide
  Target: SCNA; (+) strand; PAM type: YTN; PAM sequence: CTT
aactacttctctgttggatt

SEQ ID NO: 81163 - DNA, 20 bp, Artificial Sequence
  Description of Artificial Sequence: Synthetic oligonucleotide
  Target: SCNA; (+) strand; PAM type: YTN; PAM sequence: TTA
actacttctctgttggattg

SEQ ID NO: 81164 - DNA, 20 bp, Artificial Sequence
  Description of Artificial Sequence: Synthetic oligonucleotide
  Target: SCNA; (+) strand; PAM type: YTN; PAM sequence: CTA
cttctctgttggattgcaac

SEQ ID NO: 81165 - DNA, 20 bp, Artificial Sequence
  Description of Artificial Sequence: Synthetic oligonucleotide
  Target: SCNA; (+) strand; PAM type: YTN; PAM sequence: CTT
ctctgttggattgcaacaga

SEQ ID NO: 81166 - DNA, 20 bp, Artificial Sequence
  Description of Artificial Sequence: Synthetic oligonucleotide
  Target: SCNA; (+) strand; PAM type: YTN; PAM sequence: TTC
tctgttggattgcaacagag

SEQ ID NO: 81167 - DNA, 20 bp, Artificial Sequence
  Description of Artificial Sequence: Synthetic oligonucleotide
  Target: SCNA; (+) strand; PAM type: YTN; PAM sequence: CTC
tgttggattgcaacagagcc

SEQ ID NO: 81168 - DNA, 20 bp, Artificial Sequence
  Description of Artificial Sequence: Synthetic oligonucleotide
  Target: SCNA; (+) strand; PAM type: YTN; PAM sequence: CTG
ttggattgcaacagagccca

SEQ ID NO: 81169 - DNA, 20 bp, Artificial Sequence
  Description of Artificial Sequence: Synthetic oligonucleotide
  Target: SCNA; (+) strand; PAM type: YTN; PAM sequence: TTG
gattgcaacagagcccatta

SEQ ID NO: 81170 - DNA, 20 bp, Artificial Sequence
  Description of Artificial Sequence: Synthetic oligonucleotide
  Target: SCNA; (+) strand; PAM type: YTN; PAM sequence: TTG
caacagagcccattaaaggt

SEQ ID NO: 81171 - DNA, 20 bp, Artificial Sequence
  Description of Artificial Sequence: Synthetic oligonucleotide
  Target: SCNA; (+) strand; PAM type: YTN; PAM sequence: TTA
aaggtgcacaattaacttct

SEQ ID NO: 81172 - DNA, 20 bp, Artificial Sequence
  Description of Artificial Sequence: Synthetic oligonucleotide
  Target: SCNA; (+) strand; PAM type: YTN; PAM sequence: TTA
acttctaacagaactagttt

SEQ ID NO: 81173 - DNA, 20 bp, Artificial Sequence
  Description of Artificial Sequence: Synthetic oligonucleotide
  Target: SCNA; (+) strand; PAM type: YTN; PAM sequence: CTT
ctaacagaactagtttcaaa

SEQ ID NO: 81174 - DNA, 20 bp, Artificial Sequence
  Description of Artificial Sequence: Synthetic oligonucleotide
  Target: SCNA; (+) strand; PAM type: YTN; PAM sequence: TTC
taacagaactagtttcaaag

SEQ ID NO: 81175 - DNA, 20 bp, Artificial Sequence
  Description of Artificial Sequence: Synthetic oligonucleotide
  Target: SCNA; (+) strand; PAM type: YTN; PAM sequence: CTA
acagaactagtttcaaagga

SEQ ID NO: 81176 - DNA, 20 bp, Artificial Sequence
  Description of Artificial Sequence: Synthetic oligonucleotide
  Target: SCNA; (+) strand; PAM type: YTN; PAM sequence: CTA
gtttcaaaggagtctgtttt

SEQ ID NO: 81177 - DNA, 20 bp, Artificial Sequence
  Description of Artificial Sequence: Synthetic oligonucleotide
  Target: SCNA; (+) strand; PAM type: YTN; PAM sequence: TTT
caaaggagtctgttttattt

SEQ ID NO: 81178 - DNA, 20 bp, Artificial Sequence
  Description of Artificial Sequence: Synthetic oligonucleotide
  Target: SCNA; (+) strand; PAM type: YTN; PAM sequence: TTC
aaaggagtctgttttatttt

SEQ ID NO: 81179 - DNA, 20 bp, Artificial Sequence
  Description of Artificial Sequence: Synthetic oligonucleotide
  Target: SCNA; (+) strand; PAM type: YTN; PAM sequence: CTG
ttttatttttacactctgat

SEQ ID NO: 81180 - DNA, 20 bp, Artificial Sequence
  Description of Artificial Sequence: Synthetic oligonucleotide
  Target: SCNA; (+) strand; PAM type: YTN; PAM sequence: TTT
tatttttacactctgatttt

SEQ ID NO: 81181 - DNA, 20 bp, Artificial Sequence
  Description of Artificial Sequence: Synthetic oligonucleotide
  Target: SCNA; (+) strand; PAM type: YTN; PAM sequence: TTT
atttttacactctgattttt

SEQ ID NO: 81182 - DNA, 20 bp, Artificial Sequence
  Description of Artificial Sequence: Synthetic oligonucleotide
  Target: SCNA; (+) strand; PAM type: YTN; PAM sequence: TTA
tttttacactctgattttta

SEQ ID NO: 81183 - DNA, 20 bp, Artificial Sequence
  Description of Artificial Sequence: Synthetic oligonucleotide
  Target: SCNA; (+) strand; PAM type: YTN; PAM sequence: TTT
ttacactctgatttttaaat

SEQ ID NO: 81184 - DNA, 20 bp, Artificial Sequence
  Description of Artificial Sequence: Synthetic oligonucleotide
  Target: SCNA; (+) strand; PAM type: YTN; PAM sequence: TTT
tacactctgatttttaaatc

SEQ ID NO: 81185 - DNA, 20 bp, Artificial Sequence
  Description of Artificial Sequence: Synthetic oligonucleotide
  Target: SCNA; (+) strand; PAM type: YTN; PAM sequence: TTT
acactctgatttttaaatca

SEQ ID NO: 81186 - DNA, 20 bp, Artificial Sequence
  Description of Artificial Sequence: Synthetic oligonucleotide
  Target: SCNA; (+) strand; PAM type: YTN; PAM sequence: TTA
cactctgatttttaaatcaa

SEQ ID NO: 81187 - DNA, 20 bp, Artificial Sequence
  Description of Artificial Sequence: Synthetic oligonucleotide
  Target: SCNA; (+) strand; PAM type: YTN; PAM sequence: CTC
tgatttttaaatcaaaagta

SEQ ID NO: 81188 - DNA, 20 bp, Artificial Sequence
  Description of Artificial Sequence: Synthetic oligonucleotide
  Target: SCNA; (+) strand; PAM type: YTN; PAM sequence: CTG
atttttaaatcaaaagtatt

SEQ ID NO: 81189 - DNA, 20 bp, Artificial Sequence
  Description of Artificial Sequence: Synthetic oligonucleotide
  Target: SCNA; (+) strand; PAM type: YTN; PAM sequence: TTT
ttaaatcaaaagtattcatt

SEQ ID NO: 81190 - DNA, 20 bp, Artificial Sequence
  Description of Artificial Sequence: Synthetic oligonucleotide
  Target: SCNA; (+) strand; PAM type: YTN; PAM sequence: TTT
taaatcaaaagtattcattt

SEQ ID NO: 81191 - DNA, 20 bp, Artificial Sequence
  Description of Artificial Sequence: Synthetic oligonucleotide
  Target: SCNA; (+) strand; PAM type: YTN; PAM sequence: TTT
aaatcaaaagtattcattta

SEQ ID NO: 81192 - DNA, 20 bp, Artificial Sequence
  Description of Artificial Sequence: Synthetic oligonucleotide
  Target: SCNA; (+) strand; PAM type: YTN; PAM sequence: TTA
aatcaaaagtattcatttaa

SEQ ID NO: 81193 - DNA, 20 bp, Artificial Sequence
  Description of Artificial Sequence: Synthetic oligonucleotide
  Target: SCNA; (+) strand; PAM type: YTN; PAM sequence: TTC
atttaaagaaatatttttct

SEQ ID NO: 81194 - DNA, 20 bp, Artificial Sequence
  Description of Artificial Sequence: Synthetic oligonucleotide
  Target: SCNA; (+) strand; PAM type: YTN; PAM sequence: TTT
aaagaaatatttttctccac

SEQ ID NO: 81195 - DNA, 20 bp, Artificial Sequence
  Description of Artificial Sequence: Synthetic oligonucleotide
  Target: SCNA; (+) strand; PAM type: YTN; PAM sequence: TTA
aagaaatatttttctccact

SEQ ID NO: 81196 - DNA, 20 bp, Artificial Sequence
  Description of Artificial Sequence: Synthetic oligonucleotide
  Target: SCNA; (+) strand; PAM type: YTN; PAM sequence: TTT
ttctccactagttgtaaaaa

SEQ ID NO: 81197 - DNA, 20 bp, Artificial Sequence
  Description of Artificial Sequence: Synthetic oligonucleotide
  Target: SCNA; (+) strand; PAM type: YTN; PAM sequence: TTT
tctccactagttgtaaaaat

SEQ ID NO: 81198 - DNA, 20 bp, Artificial Sequence
  Description of Artificial Sequence: Synthetic oligonucleotide
  Target: SCNA; (+) strand; PAM type: YTN; PAM sequence: TTT
ctccactagttgtaaaaatg

SEQ ID NO: 81199 - DNA, 20 bp, Artificial Sequence
  Description of Artificial Sequence: Synthetic oligonucleotide
  Target: SCNA; (+) strand; PAM type: YTN; PAM sequence: TTC
tccactagttgtaaaaatgt

SEQ ID NO: 81200 - DNA, 20 bp, Artificial Sequence
  Description of Artificial Sequence: Synthetic oligonucleotide
  Target: SCNA; (+) strand; PAM type: YTN; PAM sequence: CTC
cactagttgtaaaaatgttg

SEQ ID NO: 81201 - DNA, 20 bp, Artificial Sequence
  Description of Artificial Sequence: Synthetic oligonucleotide
  Target: SCNA; (+) strand; PAM type: YTN; PAM sequence: CTA
gttgtaaaaatgttgcacaa

SEQ ID NO: 81202 - DNA, 20 bp, Artificial Sequence
  Description of Artificial Sequence: Synthetic oligonucleotide
  Target: SCNA; (+) strand; PAM type: YTN; PAM sequence: TTG
taaaaatgttgcacaagaaa

SEQ ID NO: 81203 - DNA, 20 bp, Artificial Sequence
  Description of Artificial Sequence: Synthetic oligonucleotide
  Target: SCNA; (+) strand; PAM type: YTN; PAM sequence: TTG
cacaagaaagttcactataa

SEQ ID NO: 81204 - DNA, 20 bp, Artificial Sequence
  Description of Artificial Sequence: Synthetic oligonucleotide
  Target: SCNA; (+) strand; PAM type: YTN; PAM sequence: TTC
actataaaactataagtaac

SEQ ID NO: 81205 - DNA, 20 bp, Artificial Sequence
  Description of Artificial Sequence: Synthetic oligonucleotide
  Target: SCNA; (+) strand; PAM type: YTN; PAM sequence: CTA
taaaactataagtaacactt

SEQ ID NO: 81206 - DNA, 20 bp, Artificial Sequence
  Description of Artificial Sequence: Synthetic oligonucleotide
  Target: SCNA; (+) strand; PAM type: YTN; PAM sequence: CTA
taagtaacacttataaaata

SEQ ID NO: 81207 - DNA, 20 bp, Artificial Sequence
  Description of Artificial Sequence: Synthetic oligonucleotide
  Target: SCNA; (+) strand; PAM type: YTN; PAM sequence: CTT
ataaaatacatattgtttgc

SEQ ID NO: 81208 - DNA, 20 bp, Artificial Sequence
  Description of Artificial Sequence: Synthetic oligonucleotide
  Target: SCNA; (+) strand; PAM type: YTN; PAM sequence: TTA
taaaatacatattgtttgct

SEQ ID NO: 81209 - DNA, 20 bp, Artificial Sequence
  Description of Artificial Sequence: Synthetic oligonucleotide
  Target: SCNA; (+) strand; PAM type: YTN; PAM sequence: TTG
tttgcttttgttttccagat

SEQ ID NO: 81210 - DNA, 20 bp, Artificial Sequence
  Description of Artificial Sequence: Synthetic oligonucleotide
  Target: SCNA; (+) strand; PAM type: YTN; PAM sequence: TTT
gcttttgttttccagatgtt

SEQ ID NO: 81211 - DNA, 20 bp, Artificial Sequence
  Description of Artificial Sequence: Synthetic oligonucleotide
  Target: SCNA; (+) strand; PAM type: YTN; PAM sequence: TTG
cttttgttttccagatgttt

SEQ ID NO: 81212 - DNA, 20 bp, Artificial Sequence
  Description of Artificial Sequence: Synthetic oligonucleotide
  Target: SCNA; (+) strand; PAM type: YTN; PAM sequence: CTT
ttgttttccagatgttttgt

SEQ ID NO: 81213 - DNA, 20 bp, Artificial Sequence
  Description of Artificial Sequence: Synthetic oligonucleotide
  Target: SCNA; (+) strand; PAM type: YTN; PAM sequence: TTT
tgttttccagatgttttgtg

SEQ ID NO: 81214 - DNA, 20 bp, Artificial Sequence
  Description of Artificial Sequence: Synthetic oligonucleotide
  Target: SCNA; (+) strand; PAM type: YTN; PAM sequence: TTT
gttttccagatgttttgtgt

SEQ ID NO: 81215 - DNA, 20 bp, Artificial Sequence
  Description of Artificial Sequence: Synthetic oligonucleotide
  Target: SCNA; (+) strand; PAM type: YTN; PAM sequence: TTG
ttttccagatgttttgtgta

SEQ ID NO: 81216 - DNA, 20 bp, Artificial Sequence
  Description of Artificial Sequence: Synthetic oligonucleotide
  Target: SCNA; (+) strand; PAM type: YTN; PAM sequence: TTT
tccagatgttttgtgtacat

SEQ ID NO: 81217 - DNA, 20 bp, Artificial Sequence
  Description of Artificial Sequence: Synthetic oligonucleotide
  Target: SCNA; (+) strand; PAM type: YTN; PAM sequence: TTT
ccagatgttttgtgtacatt

SEQ ID NO: 81218 - DNA, 20 bp, Artificial Sequence
  Description of Artificial Sequence: Synthetic oligonucleotide
  Target: SCNA; (+) strand; PAM type: YTN; PAM sequence: TTC
cagatgttttgtgtacatta

SEQ ID NO: 81219 - DNA, 20 bp, Artificial Sequence
  Description of Artificial Sequence: Synthetic oligonucleotide
  Target: SCNA; (+) strand; PAM type: YTN; PAM sequence: TTT
tgtgtacattaattcactga

SEQ ID NO: 81220 - DNA, 20 bp, Artificial Sequence
  Description of Artificial Sequence: Synthetic oligonucleotide
  Target: SCNA; (+) strand; PAM type: YTN; PAM sequence: TTT
gtgtacattaattcactgaa

SEQ ID NO: 81221 - DNA, 20 bp, Artificial Sequence
  Description of Artificial Sequence: Synthetic oligonucleotide
  Target: SCNA; (+) strand; PAM type: YTN; PAM sequence: TTG
tgtacattaattcactgaat

SEQ ID NO: 81222 - DNA, 20 bp, Artificial Sequence
  Description of Artificial Sequence: Synthetic oligonucleotide
  Target: SCNA; (+) strand; PAM type: YTN; PAM sequence: TTA
attcactgaattattttata

SEQ ID NO: 81223 - DNA, 20 bp, Artificial Sequence
  Description of Artificial Sequence: Synthetic oligonucleotide
  Target: SCNA; (+) strand; PAM type: YTN; PAM sequence: TTC
actgaattattttatagatg

SEQ ID NO: 81224 - DNA, 20 bp, Artificial Sequence
  Description of Artificial Sequence: Synthetic oligonucleotide
  Target: SCNA; (+) strand; PAM type: YTN; PAM sequence: CTG
aattattttatagatgagga

SEQ ID NO: 81225 - DNA, 20 bp, Artificial Sequence
  Description of Artificial Sequence: Synthetic oligonucleotide
  Target: SCNA; (+) strand; PAM type: YTN; PAM sequence: TTA
ttttatagatgaggaagcta

SEQ ID NO: 81226 - DNA, 20 bp, Artificial Sequence
  Description of Artificial Sequence: Synthetic oligonucleotide
  Target: SCNA; (+) strand; PAM type: YTN; PAM sequence: TTT
tatagatgaggaagctaaat

SEQ ID NO: 81227 - DNA, 20 bp, Artificial Sequence
  Description of Artificial Sequence: Synthetic oligonucleotide
  Target: SCNA; (+) strand; PAM type: YTN; PAM sequence: TTT
atagatgaggaagctaaatc

SEQ ID NO: 81228 - DNA, 20 bp, Artificial Sequence
  Description of Artificial Sequence: Synthetic oligonucleotide
  Target: SCNA; (+) strand; PAM type: YTN; PAM sequence: TTA
tagatgaggaagctaaatca

SEQ ID NO: 81229 - DNA, 20 bp, Artificial Sequence
  Description of Artificial Sequence: Synthetic oligonucleotide
  Target: SCNA; (+) strand; PAM type: YTN; PAM sequence: CTA
aatcacacagaggtgaagaa

SEQ ID NO: 81230 - DNA, 20 bp, Artificial Sequence
  Description of Artificial Sequence: Synthetic oligonucleotide
  Target: SCNA; (+) strand; PAM type: YTN; PAM sequence: CTT
gcaaaaaacacacagctggt

SEQ ID NO: 81231 - DNA, 20 bp, Artificial Sequence
  Description of Artificial Sequence: Synthetic oligonucleotide
  Target: SCNA; (+) strand; PAM type: YTN; PAM sequence: TTG
caaaaaacacacagctggta

SEQ ID NO: 81232 - DNA, 20 bp, Artificial Sequence
  Description of Artificial Sequence: Synthetic oligonucleotide
  Target: SCNA; (+) strand; PAM type: YTN; PAM sequence: CTG
gtaaggagtaagcaggaagt

SEQ ID NO: 81233 - DNA, 20 bp, Artificial Sequence
  Description of Artificial Sequence: Synthetic oligonucleotide
  Target: SCNA; (+) strand; PAM type: YTN; PAM sequence: TTG
aaccaagaagatctgactcc

SEQ ID NO: 81234 - DNA, 20 bp, Artificial Sequence
  Description of Artificial Sequence: Synthetic oligonucleotide
  Target: SCNA; (+) strand; PAM type: YTN; PAM sequence: CTG
actcctgtgtttttagtcat

SEQ ID NO: 81235 - DNA, 20 bp, Artificial Sequence
  Description of Artificial Sequence: Synthetic oligonucleotide
  Target: SCNA; (+) strand; PAM type: YTN; PAM sequence: CTC
ctgtgtttttagtcatatcc

SEQ ID NO: 81236 - DNA, 20 bp, Artificial Sequence
  Description of Artificial Sequence: Synthetic oligonucleotide
  Target: SCNA; (+) strand; PAM type: YTN; PAM sequence: CTG
tgtttttagtcatatccaca

SEQ ID NO: 81237 - DNA, 20 bp, Artificial Sequence
  Description of Artificial Sequence: Synthetic oligonucleotide
  Target: SCNA; (+) strand; PAM type: YTN; PAM sequence: TTT
ttagtcatatccacaacact

SEQ ID NO: 81238 - DNA, 20 bp, Artificial Sequence
  Description of Artificial Sequence: Synthetic oligonucleotide
  Target: SCNA; (+) strand; PAM type: YTN; PAM sequence: TTT
tagtcatatccacaacactg

SEQ ID NO: 81239 - DNA, 20 bp, Artificial Sequence
  Description of Artificial Sequence: Synthetic oligonucleotide
  Target: SCNA; (+) strand; PAM type: YTN; PAM sequence: TTT
agtcatatccacaacactgt

SEQ ID NO: 81240 - DNA, 20 bp, Artificial Sequence
  Description of Artificial Sequence: Synthetic oligonucleotide
  Target: SCNA; (+) strand; PAM type: YTN; PAM sequence: TTA
gtcatatccacaacactgta

SEQ ID NO: 81241 - DNA, 20 bp, Artificial Sequence
  Description of Artificial Sequence: Synthetic oligonucleotide
  Target: SCNA; (+) strand; PAM type: YTN; PAM sequence: CTG
tattaagattcccatatcat

SEQ ID NO: 81242 - DNA, 20 bp, Artificial Sequence
  Description of Artificial Sequence: Synthetic oligonucleotide
  Target: SCNA; (+) strand; PAM type: YTN; PAM sequence: TTA
agattcccatatcattgtcc

SEQ ID NO: 81243 - DNA, 20 bp, Artificial Sequence
  Description of Artificial Sequence: Synthetic oligonucleotide
  Target: SCNA; (+) strand; PAM type: YTN; PAM sequence: TTC
ccatatcattgtcctcattt

SEQ ID NO: 81244 - DNA, 20 bp, Artificial Sequence
  Description of Artificial Sequence: Synthetic oligonucleotide
  Target: SCNA; (+) strand; PAM type: YTN; PAM sequence: TTG
tcctcatttccattttagaa

SEQ ID NO: 81245 - DNA, 20 bp, Artificial Sequence
  Description of Artificial Sequence: Synthetic oligonucleotide
  Target: SCNA; (+) strand; PAM type: YTN; PAM sequence: CTC
atttccattttagaagtcag

SEQ ID NO: 81246 - DNA, 20 bp, Artificial Sequence
  Description of Artificial Sequence: Synthetic oligonucleotide
  Target: SCNA; (+) strand; PAM type: YTN; PAM sequence: TTT
ccattttagaagtcagtgat

SEQ ID NO: 81247 - DNA, 20 bp, Artificial Sequence
  Description of Artificial Sequence: Synthetic oligonucleotide
  Target: SCNA; (+) strand; PAM type: YTN; PAM sequence: TTC
cattttagaagtcagtgata

SEQ ID NO: 81248 - DNA, 20 bp, Artificial Sequence
  Description of Artificial Sequence: Synthetic oligonucleotide
  Target: SCNA; (+) strand; PAM type: YTN; PAM sequence: TTT
tagaagtcagtgataggaac

SEQ ID NO: 81249 - DNA, 20 bp, Artificial Sequence
  Description of Artificial Sequence: Synthetic oligonucleotide
  Target: SCNA; (+) strand; PAM type: YTN; PAM sequence: TTT
agaagtcagtgataggaaca

SEQ ID NO: 81250 - DNA, 20 bp, Artificial Sequence
  Description of Artificial Sequence: Synthetic oligonucleotide
  Target: SCNA; (+) strand; PAM type: YTN; PAM sequence: TTA
gaagtcagtgataggaacat

SEQ ID NO: 81251 - DNA, 20 bp, Artificial Sequence
  Description of Artificial Sequence: Synthetic oligonucleotide
  Target: SCNA; (+) strand; PAM type: YTN; PAM sequence: TTT
tatttgtataggcactattg

SEQ ID NO: 81252 - DNA, 20 bp, Artificial Sequence
  Description of Artificial Sequence: Synthetic oligonucleotide
  Target: SCNA; (+) strand; PAM type: YTN; PAM sequence: TTT
atttgtataggcactattgt

SEQ ID NO: 81253 - DNA, 20 bp, Artificial Sequence
  Description of Artificial Sequence: Synthetic oligonucleotide
  Target: SCNA; (+) strand; PAM type: YTN; PAM sequence: TTA
tttgtataggcactattgtg

SEQ ID NO: 81254 - DNA, 20 bp, Artificial Sequence
  Description of Artificial Sequence: Synthetic oligonucleotide
  Target: SCNA; (+) strand; PAM type: YTN; PAM sequence: TTT
gtataggcactattgtgttt

SEQ ID NO: 81255 - DNA, 20 bp, Artificial Sequence
  Description of Artificial Sequence: Synthetic oligonucleotide
  Target: SCNA; (+) strand; PAM type: YTN; PAM sequence: TTG
tataggcactattgtgttta

SEQ ID NO: 81256 - DNA, 20 bp, Artificial Sequence
  Description of Artificial Sequence: Synthetic oligonucleotide
  Target: SCNA; (+) strand; PAM type: YTN; PAM sequence: CTA
ttgtgtttaatgctttccga

SEQ ID NO: 81257 - DNA, 20 bp, Artificial Sequence
  Description of Artificial Sequence: Synthetic oligonucleotide
  Target: SCNA; (+) strand; PAM type: YTN; PAM sequence: TTG
tgtttaatgctttccgatta

SEQ ID NO: 81258 - DNA, 20 bp, Artificial Sequence
  Description of Artificial Sequence: Synthetic oligonucleotide
  Target: SCNA; (+) strand; PAM type: YTN; PAM sequence: TTT
aatgctttccgattatataa

SEQ ID NO: 81259 - DNA, 20 bp, Artificial Sequence
  Description of Artificial Sequence: Synthetic oligonucleotide
  Target: SCNA; (+) strand; PAM type: YTN; PAM sequence: TTA
atgctttccgattatataaa

SEQ ID NO: 81260 - DNA, 20 bp, Artificial Sequence
  Description of Artificial Sequence: Synthetic oligonucleotide
  Target: SCNA; (+) strand; PAM type: YTN; PAM sequence: CTT
tccgattatataaattatat

SEQ ID NO: 81261 - DNA, 20 bp, Artificial Sequence
  Description of Artificial Sequence: Synthetic oligonucleotide
  Target: SCNA; (+) strand; PAM type: YTN; PAM sequence: TTT
ccgattatataaattatatt

SEQ ID NO: 81262 - DNA, 20 bp, Artificial Sequence
  Description of Artificial Sequence: Synthetic oligonucleotide
  Target: SCNA; (+) strand; PAM type: YTN; PAM sequence: TTC
cgattatataaattatattt

SEQ ID NO: 81263 - DNA, 20 bp, Artificial Sequence
  Description of Artificial Sequence: Synthetic oligonucleotide
  Target: SCNA; (+) strand; PAM type: YTN; PAM sequence: TTA
tataaattatatttctgatt

SEQ ID NO: 81264 - DNA, 20 bp, Artificial Sequence
  Description of Artificial Sequence: Synthetic oligonucleotide
  Target: SCNA; (+) strand; PAM type: YTN; PAM sequence: TTA
tatttctgattatatctttt

SEQ ID NO: 81265 - DNA, 20 bp, Artificial Sequence
  Description of Artificial Sequence: Synthetic oligonucleotide
  Target: SCNA; (+) strand; PAM type: YTN; PAM sequence: TTT
ctgattatatcttttgcttc

SEQ ID NO: 81266 - DNA, 20 bp, Artificial Sequence
  Description of Artificial Sequence: Synthetic oligonucleotide
  Target: SCNA; (+) strand; PAM type: YTN; PAM sequence: TTC
tgattatatcttttgcttca

SEQ ID NO: 81267 - DNA, 20 bp, Artificial Sequence
  Description of Artificial Sequence: Synthetic oligonucleotide
  Target: SCNA; (+) strand; PAM type: YTN; PAM sequence: CTG
attatatcttttgcttcacc

SEQ ID NO: 81268 - DNA, 20 bp, Artificial Sequence
  Description of Artificial Sequence: Synthetic oligonucleotide
  Target: SCNA; (+) strand; PAM type: YTN; PAM sequence: TTA
tatcttttgcttcaccacat

SEQ ID NO: 81269 - DNA, 20 bp, Artificial Sequence
  Description of Artificial Sequence: Synthetic oligonucleotide
  Target: SCNA; (+) strand; PAM type: YTN; PAM sequence: CTT
ttgcttcaccacatctgcca

SEQ ID NO: 81270 - DNA, 20 bp, Artificial Sequence
  Description of Artificial Sequence: Synthetic oligonucleotide
  Target: SCNA; (+) strand; PAM type: YTN; PAM sequence: TTT
tgcttcaccacatctgccag

SEQ ID NO: 81271 - DNA, 20 bp, Artificial Sequence
  Description of Artificial Sequence: Synthetic oligonucleotide
  Target: SCNA; (+) strand; PAM type: YTN; PAM sequence: TTT
gcttcaccacatctgccagg

SEQ ID NO: 81272 - DNA, 20 bp, Artificial Sequence
  Description of Artificial Sequence: Synthetic oligonucleotide
  Target: SCNA; (+) strand; PAM type: YTN; PAM sequence: TTG
cttcaccacatctgccagga

SEQ ID NO: 81273 - DNA, 20 bp, Artificial Sequence
  Description of Artificial Sequence: Synthetic oligonucleotide
  Target: SCNA; (+) strand; PAM type: YTN; PAM sequence: CTT
caccacatctgccaggaaac

SEQ ID NO: 81274 - DNA, 20 bp, Artificial Sequence
  Description of Artificial Sequence: Synthetic oligonucleotide
  Target: SCNA; (+) strand; PAM type: YTN; PAM sequence: TTC
accacatctgccaggaaacg

SEQ ID NO: 81275 - DNA, 20 bp, Artificial Sequence
  Description of Artificial Sequence: Synthetic oligonucleotide
  Target: SCNA; (+) strand; PAM type: YTN; PAM sequence: CTG
ccaggaaacgtggagtactt

SEQ ID NO: 81276 - DNA, 20 bp, Artificial Sequence
  Description of Artificial Sequence: Synthetic oligonucleotide
  Target: SCNA; (+) strand; PAM type: YTN; PAM sequence: CTT
acaacagaaaacttaattac

SEQ ID NO: 81277 - DNA, 20 bp, Artificial Sequence
  Description of Artificial Sequence: Synthetic oligonucleotide
  Target: SCNA; (+) strand; PAM type: YTN; PAM sequence: TTA
caacagaaaacttaattaca

SEQ ID NO: 81278 - DNA, 20 bp, Artificial Sequence
  Description of Artificial Sequence: Synthetic oligonucleotide
  Target: SCNA; (+) strand; PAM type: YTN; PAM sequence: CTT
aattacagcaagtctgtggg

SEQ ID NO: 81279 - DNA, 20 bp, Artificial Sequence
  Description of Artificial Sequence: Synthetic oligonucleotide
  Target: SCNA; (+) strand; PAM type: YTN; PAM sequence: TTA
attacagcaagtctgtgggc

SEQ ID NO: 81280 - DNA, 20 bp, Artificial Sequence
  Description of Artificial Sequence: Synthetic oligonucleotide
  Target: SCNA; (+) strand; PAM type: YTN; PAM sequence: TTA
cagcaagtctgtgggctttt

SEQ ID NO: 81281 - DNA, 20 bp, Artificial Sequence
  Description of Artificial Sequence: Synthetic oligonucleotide
  Target: SCNA; (+) strand; PAM type: YTN; PAM sequence: CTG
tgggcttttaatttgttaaa

SEQ ID NO: 81282 - DNA, 20 bp, Artificial Sequence
  Description of Artificial Sequence: Synthetic oligonucleotide
  Target: SCNA; (+) strand; PAM type: YTN; PAM sequence: CTT
ttaatttgttaaattttggt

SEQ ID NO: 81283 - DNA, 20 bp, Artificial Sequence
  Description of Artificial Sequence: Synthetic oligonucleotide
  Target: SCNA; (+) strand; PAM type: YTN; PAM sequence: TTT
taatttgttaaattttggtt

SEQ ID NO: 81284 - DNA, 20 bp, Artificial Sequence
  Description of Artificial Sequence: Synthetic oligonucleotide
  Target: SCNA; (+) strand; PAM type: YTN; PAM sequence: TTT
aatttgttaaattttggttc

SEQ ID NO: 81285 - DNA, 20 bp, Artificial Sequence
  Description of Artificial Sequence: Synthetic oligonucleotide
  Target: SCNA; (+) strand; PAM type: YTN; PAM sequence: TTA
atttgttaaattttggttct

SEQ ID NO: 81286 - DNA, 20 bp, Artificial Sequence
  Description of Artificial Sequence: Synthetic oligonucleotide
  Target: SCNA; (+) strand; PAM type: YTN; PAM sequence: TTT
gttaaattttggttctcctt

SEQ ID NO: 81287 - DNA, 20 bp, Artificial Sequence
  Description of Artificial Sequence: Synthetic oligonucleotide
  Target: SCNA; (+) strand; PAM type: YTN; PAM sequence: TTG
ttaaattttggttctccttt

SEQ ID NO: 81288 - DNA, 20 bp, Artificial Sequence
  Description of Artificial Sequence: Synthetic oligonucleotide
  Target: SCNA; (+) strand; PAM type: YTN; PAM sequence: TTA
aattttggttctcctttgat

SEQ ID NO: 81289 - DNA, 20 bp, Artificial Sequence
  Description of Artificial Sequence: Synthetic oligonucleotide
  Target: SCNA; (+) strand; PAM type: YTN; PAM sequence: TTT
tggttctcctttgatttctc

SEQ ID NO: 81290 - DNA, 20 bp, Artificial Sequence
  Description of Artificial Sequence: Synthetic oligonucleotide
  Target: SCNA; (+) strand; PAM type: YTN; PAM sequence: TTT
ggttctcctttgatttctct

SEQ ID NO: 81291 - DNA, 20 bp, Artificial Sequence
  Description of Artificial Sequence: Synthetic oligonucleotide
  Target: SCNA; (+) strand; PAM type: YTN; PAM sequence: TTG
gttctcctttgatttctcta

SEQ ID NO: 81292 - DNA, 20 bp, Artificial Sequence
  Description of Artificial Sequence: Synthetic oligonucleotide
  Target: SCNA; (+) strand; PAM type: YTN; PAM sequence: TTC
tcctttgatttctctatttc

SEQ ID NO: 81293 - DNA, 20 bp, Artificial Sequence
  Description of Artificial Sequence: Synthetic oligonucleotide
  Target: SCNA; (+) strand; PAM type: YTN; PAM sequence: CTC
ctttgatttctctatttctg

SEQ ID NO: 81294 - DNA, 20 bp, Artificial Sequence
  Description of Artificial Sequence: Synthetic oligonucleotide
  Target: SCNA; (+) strand; PAM type: YTN; PAM sequence: CTT
tgatttctctatttctggca

SEQ ID NO: 81295 - DNA, 20 bp, Artificial Sequence
  Description of Artificial Sequence: Synthetic oligonucleotide
  Target: SCNA; (+) strand; PAM type: YTN; PAM sequence: TTT
gatttctctatttctggcac

SEQ ID NO: 81296 - DNA, 20 bp, Artificial Sequence
  Description of Artificial Sequence: Synthetic oligonucleotide
  Target: SCNA; (+) strand; PAM type: YTN; PAM sequence: TTG
atttctctatttctggcact

SEQ ID NO: 81297 - DNA, 20 bp, Artificial Sequence
  Description of Artificial Sequence: Synthetic oligonucleotide
  Target: SCNA; (+) strand; PAM type: YTN; PAM sequence: TTT
ctctatttctggcactctca

SEQ ID NO: 81298 - DNA, 20 bp, Artificial Sequence
  Description of Artificial Sequence: Synthetic oligonucleotide
  Target: SCNA; (+) strand; PAM type: YTN; PAM sequence: TTC
tctatttctggcactctcat

SEQ ID NO: 81299 - DNA, 20 bp, Artificial Sequence
  Description of Artificial Sequence: Synthetic oligonucleotide
  Target: SCNA; (+) strand; PAM type: YTN; PAM sequence: CTC
tatttctggcactctcatcc

SEQ ID NO: 81300 - DNA, 20 bp, Artificial Sequence
  Description of Artificial Sequence: Synthetic oligonucleotide
  Target: SCNA; (+) strand; PAM type: YTN; PAM sequence: CTA
tttctggcactctcatcctc

SEQ ID NO: 81301 - DNA, 20 bp, Artificial Sequence
  Description of Artificial Sequence: Synthetic oligonucleotide
  Target: SCNA; (+) strand; PAM type: YTN; PAM sequence: TTT
ctggcactctcatcctcatc

SEQ ID NO: 81302 - DNA, 20 bp, Artificial Sequence
  Description of Artificial Sequence: Synthetic oligonucleotide
  Target: SCNA; (+) strand; PAM type: YTN; PAM sequence: TTC
tggcactctcatcctcatct

SEQ ID NO: 81303 - DNA, 20 bp, Artificial Sequence
  Description of Artificial Sequence: Synthetic oligonucleotide
  Target: SCNA; (+) strand; PAM type: YTN; PAM sequence: CTG
gcactctcatcctcatcttc

SEQ ID NO: 81304 - DNA, 20 bp, Artificial Sequence
  Description of Artificial Sequence: Synthetic oligonucleotide
  Target: SCNA; (+) strand; PAM type: YTN; PAM sequence: CTC
tcatcctcatcttcctcaac

SEQ ID NO: 81305 - DNA, 20 bp, Artificial Sequence
  Description of Artificial Sequence: Synthetic oligonucleotide
  Target: SCNA; (+) strand; PAM type: YTN; PAM sequence: CTC
atcctcatcttcctcaacat

SEQ ID NO: 81306 - DNA, 20 bp, Artificial Sequence
  Description of Artificial Sequence: Synthetic oligonucleotide
  Target: SCNA; (+) strand; PAM type: YTN; PAM sequence: CTC
atcttcctcaacatctgatg

SEQ ID NO: 81307 - DNA, 20 bp, Artificial Sequence
  Description of Artificial Sequence: Synthetic oligonucleotide
  Target: SCNA; (+) strand; PAM type: YTN; PAM sequence: CTT
cctcaacatctgatgatgat

SEQ ID NO: 81308 - DNA, 20 bp, Artificial Sequence
  Description of Artificial Sequence: Synthetic oligonucleotide
  Target: SCNA; (+) strand; PAM type: YTN; PAM sequence: TTC
ctcaacatctgatgatgatt

SEQ ID NO: 81309 - DNA, 20 bp, Artificial Sequence
  Description of Artificial Sequence: Synthetic oligonucleotide
  Target: SCNA; (+) strand; PAM type: YTN; PAM sequence: CTC
aacatctgatgatgattatc

SEQ ID NO: 81310 - DNA, 20 bp, Artificial Sequence
  Description of Artificial Sequence: Synthetic oligonucleotide
  Target: SCNA; (+) strand; PAM type: YTN; PAM sequence: CTG
atgatgattatcatcctttt

SEQ ID NO: 81311 - DNA, 20 bp, Artificial Sequence
  Description of Artificial Sequence: Synthetic oligonucleotide
  Target: SCNA; (+) strand; PAM type: YTN; PAM sequence: TTA
tcatccttttcatcattttt

SEQ ID NO: 81312 - DNA, 20 bp, Artificial Sequence
  Description of Artificial Sequence: Synthetic oligonucleotide
  Target: SCNA; (+) strand; PAM type: YTN; PAM sequence: CTT
ttcatcatttttgatatttc

SEQ ID NO: 81313 - DNA, 20 bp, Artificial Sequence
  Description of Artificial Sequence: Synthetic oligonucleotide
  Target: SCNA; (+) strand; PAM type: YTN; PAM sequence: TTT
tcatcatttttgatatttct

SEQ ID NO: 81314 - DNA, 20 bp, Artificial Sequence
  Description of Artificial Sequence: Synthetic oligonucleotide
  Target: SCNA; (+) strand; PAM type: YTN; PAM sequence: TTT
catcatttttgatatttctt

SEQ ID NO: 81315 - DNA, 20 bp, Artificial Sequence
  Description of Artificial Sequence: Synthetic oligonucleotide
  Target: SCNA; (+) strand; PAM type: YTN; PAM sequence: TTC
atcatttttgatatttcttg

SEQ ID NO: 81316 - DNA, 20 bp, Artificial Sequence
  Description of Artificial Sequence: Synthetic oligonucleotide
  Target: SCNA; (+) strand; PAM type: YTN; PAM sequence: TTT
ttgatatttcttgattgtaa

SEQ ID NO: 81317 - DNA, 20 bp, Artificial Sequence
  Description of Artificial Sequence: Synthetic oligonucleotide
  Target: SCNA; (+) strand; PAM type: YTN; PAM sequence: TTT
tgatatttcttgattgtaaa

SEQ ID NO: 81318 - DNA, 20 bp, Artificial Sequence
  Description of Artificial Sequence: Synthetic oligonucleotide
  Target: SCNA; (+) strand; PAM type: YTN; PAM sequence: TTT
gatatttcttgattgtaaac

SEQ ID NO: 81319 - DNA, 20 bp, Artificial Sequence
  Description of Artificial Sequence: Synthetic oligonucleotide
  Target: SCNA; (+) strand; PAM type: YTN; PAM sequence: TTG
atatttcttgattgtaaacc

SEQ ID NO: 81320 - DNA, 20 bp, Artificial Sequence
  Description of Artificial Sequence: Synthetic oligonucleotide
  Target: SCNA; (+) strand; PAM type: YTN; PAM sequence: TTT
cttgattgtaaacctaattg

SEQ ID NO: 81321 - DNA, 20 bp, Artificial Sequence
  Description of Artificial Sequence: Synthetic oligonucleotide
  Target: SCNA; (+) strand; PAM type: YTN; PAM sequence: TTC
ttgattgtaaacctaattga

SEQ ID NO: 81322 - DNA, 20 bp, Artificial Sequence
  Description of Artificial Sequence: Synthetic oligonucleotide
  Target: SCNA; (+) strand; PAM type: YTN; PAM sequence: CTT
gattgtaaacctaattgact

SEQ ID NO: 81323 - DNA, 20 bp, Artificial Sequence
  Description of Artificial Sequence: Synthetic oligonucleotide
  Target: SCNA; (+) strand; PAM type: YTN; PAM sequence: TTG
attgtaaacctaattgactt

SEQ ID NO: 81324 - DNA, 20 bp, Artificial Sequence
  Description of Artificial Sequence: Synthetic oligonucleotide
  Target: SCNA; (+) strand; PAM type: YTN; PAM sequence: TTG
taaacctaattgacttgttc

SEQ ID NO: 81325 - DNA, 20 bp, Artificial Sequence
  Description of Artificial Sequence: Synthetic oligonucleotide
  Target: SCNA; (+) strand; PAM type: YTN; PAM sequence: CTA
attgacttgttcaaattctc

SEQ ID NO: 81326 - DNA, 20 bp, Artificial Sequence
  Description of Artificial Sequence: Synthetic oligonucleotide
  Target: SCNA; (+) strand; PAM type: YTN; PAM sequence: TTG
acttgttcaaattctcggta

SEQ ID NO: 81327 - DNA, 20 bp, Artificial Sequence
  Description of Artificial Sequence: Synthetic oligonucleotide
  Target: SCNA; (+) strand; PAM type: YTN; PAM sequence: CTT
gttcaaattctcggtaaatt

SEQ ID NO: 81328 - DNA, 20 bp, Artificial Sequence
  Description of Artificial Sequence: Synthetic oligonucleotide
  Target: SCNA; (+) strand; PAM type: YTN; PAM sequence: TTG
ttcaaattctcggtaaattt

SEQ ID NO: 81329 - DNA, 20 bp, Artificial Sequence
  Description of Artificial Sequence: Synthetic oligonucleotide
  Target: SCNA; (+) strand; PAM type: YTN; PAM sequence: TTC
aaattctcggtaaatttagg

SEQ ID NO: 81330 - DNA, 20 bp, Artificial Sequence
  Description of Artificial Sequence: Synthetic oligonucleotide
  Target: SCNA; (+) strand; PAM type: YTN; PAM sequence: TTC
tcggtaaatttaggccaaat

SEQ ID NO: 81331 - DNA, 20 bp, Artificial Sequence
  Description of Artificial Sequence: Synthetic oligonucleotide
  Target: SCNA; (+) strand; PAM type: YTN; PAM sequence: CTC
ggtaaatttaggccaaatga

SEQ ID NO: 81332 - DNA, 20 bp, Artificial Sequence
  Description of Artificial Sequence: Synthetic oligonucleotide
  Target: SCNA; (+) strand; PAM type: YTN; PAM sequence: TTT
aggccaaatgaataatataa

SEQ ID NO: 81333 - DNA, 20 bp, Artificial Sequence
  Description of Artificial Sequence: Synthetic oligonucleotide
  Target: SCNA; (+) strand; PAM type: YTN; PAM sequence: TTA
ggccaaatgaataatataat

SEQ ID NO: 81334 - DNA, 20 bp, Artificial Sequence
  Description of Artificial Sequence: Synthetic oligonucleotide
  Target: SCNA; (+) strand; PAM type: YTN; PAM sequence: TTG
cacaataatatttgtacaaa

SEQ ID NO: 81335 - DNA, 20 bp, Artificial Sequence
  Description of Artificial Sequence: Synthetic oligonucleotide
  Target: SCNA; (+) strand; PAM type: YTN; PAM sequence: TTT
gtacaaatagctataccata

SEQ ID NO: 81336 - DNA, 20 bp, Artificial Sequence
  Description of Artificial Sequence: Synthetic oligonucleotide
  Target: SCNA; (+) strand; PAM type: YTN; PAM sequence: TTG
tacaaatagctataccataa

SEQ ID NO: 81337 - DNA, 20 bp, Artificial Sequence
  Description of Artificial Sequence: Synthetic oligonucleotide
  Target: SCNA; (+) strand; PAM type: YTN; PAM sequence: CTA
taccataacaatacaaagat

SEQ ID NO: 81338 - DNA, 20 bp, Artificial Sequence
  Description of Artificial Sequence: Synthetic oligonucleotide
  Target: SCNA; (+) strand; PAM type: YTN; PAM sequence: TTT
tactgactgtccaagggtgt

SEQ ID NO: 81339 - DNA, 20 bp, Artificial Sequence
  Description of Artificial Sequence: Synthetic oligonucleotide
  Target: SCNA; (+) strand; PAM type: YTN; PAM sequence: TTT
actgactgtccaagggtgtt

SEQ ID NO: 81340 - DNA, 20 bp, Artificial Sequence
  Description of Artificial Sequence: Synthetic oligonucleotide
  Target: SCNA; (+) strand; PAM type: YTN; PAM sequence: TTA
ctgactgtccaagggtgttt

SEQ ID NO: 81341 - DNA, 20 bp, Artificial Sequence
  Description of Artificial Sequence: Synthetic oligonucleotide
  Target: SCNA; (+) strand; PAM type: YTN; PAM sequence: CTG
actgtccaagggtgtttcct

SEQ ID NO: 81342 - DNA, 20 bp, Artificial Sequence
  Description of Artificial Sequence: Synthetic oligonucleotide
  Target: SCNA; (+) strand; PAM type: YTN; PAM sequence: CTG
tccaagggtgtttcctgaaa

SEQ ID NO: 81343 - DNA, 20 bp, Artificial Sequence
  Description of Artificial Sequence: Synthetic oligonucleotide
  Target: SCNA; (+) strand; PAM type: YTN; PAM sequence: TTT
cctgaaatgcactctgaatt

SEQ ID NO: 81344 - DNA, 20 bp, Artificial Sequence
  Description of Artificial Sequence: Synthetic oligonucleotide
  Target: SCNA; (+) strand; PAM type: YTN; PAM sequence: TTC
ctgaaatgcactctgaatta

SEQ ID NO: 81345 - DNA, 20 bp, Artificial Sequence
  Description of Artificial Sequence: Synthetic oligonucleotide
  Target: SCNA; (+) strand; PAM type: YTN; PAM sequence: CTG
aaatgcactctgaattatca

SEQ ID NO: 81346 - DNA, 20 bp, Artificial Sequence
  Description of Artificial Sequence: Synthetic oligonucleotide
  Target: SCNA; (+) strand; PAM type: YTN; PAM sequence: CTC
tgaattatcaaaggaatatt

SEQ ID NO: 81347 - DNA, 20 bp, Artificial Sequence
  Description of Artificial Sequence: Synthetic oligonucleotide
  Target: SCNA; (+) strand; PAM type: YTN; PAM sequence: CTG
aattatcaaaggaatattgt

SEQ ID NO: 81348 - DNA, 20 bp, Artificial Sequence
  Description of Artificial Sequence: Synthetic oligonucleotide
  Target: SCNA; (+) strand; PAM type: YTN; PAM sequence: TTA
tcaaaggaatattgtaatca

SEQ ID NO: 81349 - DNA, 20 bp, Artificial Sequence
  Description of Artificial Sequence: Synthetic oligonucleotide
  Target: SCNA; (+) strand; PAM type: YTN; PAM sequence: TTG
taatcaacataatttaaggt

SEQ ID NO: 81350 - DNA, 20 bp, Artificial Sequence
  Description of Artificial Sequence: Synthetic oligonucleotide
  Target: SCNA; (+) strand; PAM type: YTN; PAM sequence: TTT
aaggtcaaaatattttactg

SEQ ID NO: 81351 - DNA, 20 bp, Artificial Sequence
  Description of Artificial Sequence: Synthetic oligonucleotide
  Target: SCNA; (+) strand; PAM type: YTN; PAM sequence: TTA
aggtcaaaatattttactgt

SEQ ID NO: 81352 - DNA, 20 bp, Artificial Sequence
  Description of Artificial Sequence: Synthetic oligonucleotide
  Target: SCNA; (+) strand; PAM type: YTN; PAM sequence: TTT
tactgtaatcaacagaaatt

SEQ ID NO: 81353 - DNA, 20 bp, Artificial Sequence
  Description of Artificial Sequence: Synthetic oligonucleotide
  Target: SCNA; (+) strand; PAM type: YTN; PAM sequence: TTT
actgtaatcaacagaaattt

SEQ ID NO: 81354 - DNA, 20 bp, Artificial Sequence
  Description of Artificial Sequence: Synthetic oligonucleotide
  Target: SCNA; (+) strand; PAM type: YTN; PAM sequence: TTA
ctgtaatcaacagaaatttt

SEQ ID NO: 81355 - DNA, 20 bp, Artificial Sequence
  Description of Artificial Sequence: Synthetic oligonucleotide
  Target: SCNA; (+) strand; PAM type: YTN; PAM sequence: CTG
taatcaacagaaattttact

SEQ ID NO: 81356 - DNA, 20 bp, Artificial Sequence
  Description of Artificial Sequence: Synthetic oligonucleotide
  Target: SCNA; (+) strand; PAM type: YTN; PAM sequence: TTT
tactttttttaaaattatgg

SEQ ID NO: 81357 - DNA, 20 bp, Artificial Sequence
  Description of Artificial Sequence: Synthetic oligonucleotide
  Target: SCNA; (+) strand; PAM type: YTN; PAM sequence: TTT
actttttttaaaattatggc

SEQ ID NO: 81358 - DNA, 20 bp, Artificial Sequence
  Description of Artificial Sequence: Synthetic oligonucleotide
  Target: SCNA; (+) strand; PAM type: YTN; PAM sequence: TTA
ctttttttaaaattatggca

SEQ ID NO: 81359 - DNA, 20 bp, Artificial Sequence
  Description of Artificial Sequence: Synthetic oligonucleotide
  Target: SCNA; (+) strand; PAM type: YTN; PAM sequence: CTT
tttttaaaattatggcaata

SEQ ID NO: 81360 - DNA, 20 bp, Artificial Sequence
  Description of Artificial Sequence: Synthetic oligonucleotide
  Target: SCNA; (+) strand; PAM type: YTN; PAM sequence: TTT
ttttaaaattatggcaatat

SEQ ID NO: 81361 - DNA, 20 bp, Artificial Sequence
  Description of Artificial Sequence: Synthetic oligonucleotide
  Target: SCNA; (+) strand; PAM type: YTN; PAM sequence: TTT
tttaaaattatggcaatatt

SEQ ID NO: 81362 - DNA, 20 bp, Artificial Sequence
  Description of Artificial Sequence: Synthetic oligonucleotide
  Target: SCNA; (+) strand; PAM type: YTN; PAM sequence: TTT
ttaaaattatggcaatattc

SEQ ID NO: 81363 - DNA, 20 bp, Artificial Sequence
  Description of Artificial Sequence: Synthetic oligonucleotide
  Target: SCNA; (+) strand; PAM type: YTN; PAM sequence: TTT
taaaattatggcaatattca

SEQ ID NO: 81364 - DNA, 20 bp, Artificial Sequence
  Description of Artificial Sequence: Synthetic oligonucleotide
  Target: SCNA; (+) strand; PAM type: YTN; PAM sequence: TTT
aaaattatggcaatattcac

SEQ ID NO: 81365 - DNA, 20 bp, Artificial Sequence
  Description of Artificial Sequence: Synthetic oligonucleotide
  Target: SCNA; (+) strand; PAM type: YTN; PAM sequence: TTA
aaattatggcaatattcaca

SEQ ID NO: 81366 - DNA, 20 bp, Artificial Sequence
  Description of Artificial Sequence: Synthetic oligonucleotide
  Target: SCNA; (+) strand; PAM type: YTN; PAM sequence: TTA
tggcaatattcacattttat

SEQ ID NO: 81367 - DNA, 20 bp, Artificial Sequence
  Description of Artificial Sequence: Synthetic oligonucleotide
  Target: SCNA; (+) strand; PAM type: YTN; PAM sequence: TTC
acattttatttttgtcagca

SEQ ID NO: 81368 - DNA, 20 bp, Artificial Sequence
  Description of Artificial Sequence: Synthetic oligonucleotide
  Target: SCNA; (+) strand; PAM type: YTN; PAM sequence: TTT
tatttttgtcagcagtttgt

SEQ ID NO: 81369 - DNA, 20 bp, Artificial Sequence
  Description of Artificial Sequence: Synthetic oligonucleotide
  Target: SCNA; (+) strand; PAM type: YTN; PAM sequence: TTT
atttttgtcagcagtttgtc

SEQ ID NO: 81370 - DNA, 20 bp, Artificial Sequence
  Description of Artificial Sequence: Synthetic oligonucleotide
  Target: SCNA; (+) strand; PAM type: YTN; PAM sequence: TTA
tttttgtcagcagtttgtca

SEQ ID NO: 81371 - DNA, 20 bp, Artificial Sequence
  Description of Artificial Sequence: Synthetic oligonucleotide
  Target: SCNA; (+) strand; PAM type: YTN; PAM sequence: TTT
ttgtcagcagtttgtcaata

SEQ ID NO: 81372 - DNA, 20 bp, Artificial Sequence
  Description of Artificial Sequence: Synthetic oligonucleotide
  Target: SCNA; (+) strand; PAM type: YTN; PAM sequence: TTT
tgtcagcagtttgtcaatac

SEQ ID NO: 81373 - DNA, 20 bp, Artificial Sequence
  Description of Artificial Sequence: Synthetic oligonucleotide
  Target: SCNA; (+) strand; PAM type: YTN; PAM sequence: TTT
gtcagcagtttgtcaataca

SEQ ID NO: 81374 - DNA, 20 bp, Artificial Sequence
  Description of Artificial Sequence: Synthetic oligonucleotide
  Target: SCNA; (+) strand; PAM type: YTN; PAM sequence: TTG
tcagcagtttgtcaatacat

SEQ ID NO: 81375 - DNA, 20 bp, Artificial Sequence
  Description of Artificial Sequence: Synthetic oligonucleotide
  Target: SCNA; (+) strand; PAM type: YTN; PAM sequence: TTT
gtcaatacatttttggtcag

SEQ ID NO: 81376 - DNA, 20 bp, Artificial Sequence
  Description of Artificial Sequence: Synthetic oligonucleotide
  Target: SCNA; (+) strand; PAM type: YTN; PAM sequence: TTG
tcaatacatttttggtcaga

SEQ ID NO: 81377 - DNA, 20 bp, Artificial Sequence
  Description of Artificial Sequence: Synthetic oligonucleotide
  Target: SCNA; (+) strand; PAM type: YTN; PAM sequence: TTT
ttggtcagaatatttaaatg

SEQ ID NO: 81378 - DNA, 20 bp, Artificial Sequence
  Description of Artificial Sequence: Synthetic oligonucleotide
  Target: SCNA; (+) strand; PAM type: YTN; PAM sequence: TTT
tggtcagaatatttaaatgc

SEQ ID NO: 81379 - DNA, 20 bp, Artificial Sequence
  Description of Artificial Sequence: Synthetic oligonucleotide
  Target: SCNA; (+) strand; PAM type: YTN; PAM sequence: TTT
ggtcagaatatttaaatgcc

SEQ ID NO: 81380 - DNA, 20 bp, Artificial Sequence
  Description of Artificial Sequence: Synthetic oligonucleotide
  Target: SCNA; (+) strand; PAM type: YTN; PAM sequence: TTG
gtcagaatatttaaatgccc

SEQ ID NO: 81381 - DNA, 20 bp, Artificial Sequence
  Description of Artificial Sequence: Synthetic oligonucleotide
  Target: SCNA; (+) strand; PAM type: YTN; PAM sequence: TTT
aaatgcccacttactataaa

SEQ ID NO: 81382 - DNA, 20 bp, Artificial Sequence
  Description of Artificial Sequence: Synthetic oligonucleotide
  Target: SCNA; (+) strand; PAM type: YTN; PAM sequence: TTA
aatgcccacttactataaat

SEQ ID NO: 81383 - DNA, 20 bp, Artificial Sequence
  Description of Artificial Sequence: Synthetic oligonucleotide
  Target: SCNA; (+) strand; PAM type: YTN; PAM sequence: CTT
actataaattaaacatagct

SEQ ID NO: 81384 - DNA, 20 bp, Artificial Sequence
  Description of Artificial Sequence: Synthetic oligonucleotide
  Target: SCNA; (+) strand; PAM type: YTN; PAM sequence: TTA
ctataaattaaacatagctt

SEQ ID NO: 81385 - DNA, 20 bp, Artificial Sequence
  Description of Artificial Sequence: Synthetic oligonucleotide
  Target: SCNA; (+) strand; PAM type: YTN; PAM sequence: CTA
taaattaaacatagcttatc

SEQ ID NO: 81386 - DNA, 20 bp, Artificial Sequence
  Description of Artificial Sequence: Synthetic oligonucleotide
  Target: SCNA; (+) strand; PAM type: YTN; PAM sequence: TTA
aacatagcttatcaattcaa

SEQ ID NO: 81387 - DNA, 20 bp, Artificial Sequence
  Description of Artificial Sequence: Synthetic oligonucleotide
  Target: SCNA; (+) strand; PAM type: YTN; PAM sequence: CTT
atcaattcaaagccctcatt

SEQ ID NO: 81388 - DNA, 20 bp, Artificial Sequence
  Description of Artificial Sequence: Synthetic oligonucleotide
  Target: SCNA; (+) strand; PAM type: YTN; PAM sequence: TTA
tcaattcaaagccctcatta

SEQ ID NO: 81389 - DNA, 20 bp, Artificial Sequence
  Description of Artificial Sequence: Synthetic oligonucleotide
  Target: SCNA; (+) strand; PAM type: YTN; PAM sequence: TTC
aaagccctcattattcttgg

SEQ ID NO: 81390 - DNA, 20 bp, Artificial Sequence
  Description of Artificial Sequence: Synthetic oligonucleotide
  Target: SCNA; (+) strand; PAM type: YTN; PAM sequence: CTC
attattcttggcaagtatat

SEQ ID NO: 81391 - DNA, 20 bp, Artificial Sequence
  Description of Artificial Sequence: Synthetic oligonucleotide
  Target: SCNA; (+) strand; PAM type: YTN; PAM sequence: TTA
ttcttggcaagtatattttt

SEQ ID NO: 81392 - DNA, 20 bp, Artificial Sequence
  Description of Artificial Sequence: Synthetic oligonucleotide
  Target: SCNA; (+) strand; PAM type: YTN; PAM sequence: TTC
ttggcaagtatattttttat

SEQ ID NO: 81393 - DNA, 20 bp, Artificial Sequence
  Description of Artificial Sequence: Synthetic oligonucleotide
  Target: SCNA; (+) strand; PAM type: YTN; PAM sequence: CTT
ggcaagtatattttttattt

SEQ ID NO: 81394 - DNA, 20 bp, Artificial Sequence
  Description of Artificial Sequence: Synthetic oligonucleotide
  Target: SCNA; (+) strand; PAM type: YTN; PAM sequence: TTG
gcaagtatattttttattta

SEQ ID NO: 81395 - DNA, 20 bp, Artificial Sequence
  Description of Artificial Sequence: Synthetic oligonucleotide
  Target: SCNA; (+) strand; PAM type: YTN; PAM sequence: TTT
tttatttataatcaatattt

SEQ ID NO: 81396 - DNA, 20 bp, Artificial Sequence
  Description of Artificial Sequence: Synthetic oligonucleotide
  Target: SCNA; (+) strand; PAM type: YTN; PAM sequence: TTT
ttatttataatcaatattta

SEQ ID NO: 81397 - DNA, 20 bp, Artificial Sequence
  Description of Artificial Sequence: Synthetic oligonucleotide
  Target: SCNA; (+) strand; PAM type: YTN; PAM sequence: TTT
tatttataatcaatatttac

SEQ ID NO: 81398 - DNA, 20 bp, Artificial Sequence
  Description of Artificial Sequence: Synthetic oligonucleotide
  Target: SCNA; (+) strand; PAM type: YTN; PAM sequence: TTT
atttataatcaatatttacc

SEQ ID NO: 81399 - DNA, 20 bp, Artificial Sequence
  Description of Artificial Sequence: Synthetic oligonucleotide
  Target: SCNA; (+) strand; PAM type: YTN; PAM sequence: TTA
tttataatcaatatttacct

SEQ ID NO: 81400 - DNA, 20 bp, Artificial Sequence
  Description of Artificial Sequence: Synthetic oligonucleotide
  Target: SCNA; (+) strand; PAM type: YTN; PAM sequence: TTT
ataatcaatatttacctatt

SEQ ID NO: 81401 - DNA, 20 bp, Artificial Sequence
  Description of Artificial Sequence: Synthetic oligonucleotide
  Target: SCNA; (+) strand; PAM type: YTN; PAM sequence: TTA
taatcaatatttacctattt

SEQ ID NO: 81402 - DNA, 20 bp, Artificial Sequence
  Description of Artificial Sequence: Synthetic oligonucleotide
  Target: SCNA; (+) strand; PAM type: YTN; PAM sequence: TTT
acctatttaaaaatacttta

SEQ ID NO: 81403 - DNA, 20 bp, Artificial Sequence
  Description of Artificial Sequence: Synthetic oligonucleotide
  Target: SCNA; (+) strand; PAM type: YTN; PAM sequence: TTA
cctatttaaaaatactttat

SEQ ID NO: 81404 - DNA, 20 bp, Artificial Sequence
  Description of Artificial Sequence: Synthetic oligonucleotide
  Target: SCNA; (+) strand; PAM type: YTN; PAM sequence: CTA
tttaaaaatactttataaag

SEQ ID NO: 81405 - DNA, 20 bp, Artificial Sequence
  Description of Artificial Sequence: Synthetic oligonucleotide
  Target: SCNA; (+) strand; PAM type: YTN; PAM sequence: TTT
aaaaatactttataaagaat

SEQ ID NO: 81406 - DNA, 20 bp, Artificial Sequence
  Description of Artificial Sequence: Synthetic oligonucleotide
  Target: SCNA; (+) strand; PAM type: YTN; PAM sequence: TTA
aaaatactttataaagaatt

SEQ ID NO: 81407 - DNA, 20 bp, Artificial Sequence
  Description of Artificial Sequence: Synthetic oligonucleotide
  Target: SCNA; (+) strand; PAM type: YTN; PAM sequence: CTT
tataaagaattcagtttcaa

SEQ ID NO: 81408 - DNA, 20 bp, Artificial Sequence
  Description of Artificial Sequence: Synthetic oligonucleotide
  Target: SCNA; (+) strand; PAM type: YTN; PAM sequence: TTT
ataaagaattcagtttcaat

SEQ ID NO: 81409 - DNA, 20 bp, Artificial Sequence
  Description of Artificial Sequence: Synthetic oligonucleotide
  Target: SCNA; (+) strand; PAM type: YTN; PAM sequence: TTA
taaagaattcagtttcaata

SEQ ID NO: 81410 - DNA, 20 bp, Artificial Sequence
  Description of Artificial Sequence: Synthetic oligonucleotide
  Target: SCNA; (+) strand; PAM type: YTN; PAM sequence: TTC
agtttcaataagactgatat

SEQ ID NO: 81411 - DNA, 20 bp, Artificial Sequence
  Description of Artificial Sequence: Synthetic oligonucleotide
  Target: SCNA; (+) strand; PAM type: YTN; PAM sequence: TTT
caataagactgatatgttct

SEQ ID NO: 81412 - DNA, 20 bp, Artificial Sequence
  Description of Artificial Sequence: Synthetic oligonucleotide
  Target: SCNA; (+) strand; PAM type: YTN; PAM sequence: TTC
aataagactgatatgttctt

SEQ ID NO: 81413 - DNA, 20 bp, Artificial Sequence
  Description of Artificial Sequence: Synthetic oligonucleotide
  Target: SCNA; (+) strand; PAM type: YTN; PAM sequence: CTG
atatgttcttagaatgctca

SEQ ID NO: 81414 - DNA, 20 bp, Artificial Sequence
  Description of Artificial Sequence: Synthetic oligonucleotide
  Target: SCNA; (+) strand; PAM type: YTN; PAM sequence: TTC
ttagaatgctcagtgattgt

SEQ ID NO: 81415 - DNA, 20 bp, Artificial Sequence
  Description of Artificial Sequence: Synthetic oligonucleotide
  Target: SCNA; (+) strand; PAM type: YTN; PAM sequence: CTT
agaatgctcagtgattgttt

SEQ ID NO: 81416 - DNA, 20 bp, Artificial Sequence
  Description of Artificial Sequence: Synthetic oligonucleotide
  Target: SCNA; (+) strand; PAM type: YTN; PAM sequence: TTA
gaatgctcagtgattgtttt

SEQ ID NO: 81417 - DNA, 20 bp, Artificial Sequence
  Description of Artificial Sequence: Synthetic oligonucleotide
  Target: SCNA; (+) strand; PAM type: YTN; PAM sequence: CTC
agtgattgttttacaatttc

SEQ ID NO: 81418 - DNA, 20 bp, Artificial Sequence
  Description of Artificial Sequence: Synthetic oligonucleotide
  Target: SCNA; (+) strand; PAM type: YTN; PAM sequence: TTG
ttttacaatttcataggaat

SEQ ID NO: 81419 - DNA, 20 bp, Artificial Sequence
  Description of Artificial Sequence: Synthetic oligonucleotide
  Target: SCNA; (+) strand; PAM type: YTN; PAM sequence: TTT
tacaatttcataggaatctt

SEQ ID NO: 81420 - DNA, 20 bp, Artificial Sequence
  Description of Artificial Sequence: Synthetic oligonucleotide
  Target: SCNA; (+) strand; PAM type: YTN; PAM sequence: TTT
acaatttcataggaatcttg

SEQ ID NO: 81421 - DNA, 20 bp, Artificial Sequence
  Description of Artificial Sequence: Synthetic oligonucleotide
  Target: SCNA; (+) strand; PAM type: YTN; PAM sequence: TTA
caatttcataggaatcttga

SEQ ID NO: 81422 - DNA, 20 bp, Artificial Sequence
  Description of Artificial Sequence: Synthetic oligonucleotide
  Target: SCNA; (+) strand; PAM type: YTN; PAM sequence: TTT
cataggaatcttgaatactg

SEQ ID NO: 81423 - DNA, 20 bp, Artificial Sequence
  Description of Artificial Sequence: Synthetic oligonucleotide
  Target: SCNA; (+) strand; PAM type: YTN; PAM sequence: TTC
ataggaatcttgaatactgg

SEQ ID NO: 81424 - DNA, 20 bp, Artificial Sequence
  Description of Artificial Sequence: Synthetic oligonucleotide
  Target: SCNA; (+) strand; PAM type: YTN; PAM sequence: CTT
gaatactgggccacactaat

SEQ ID NO: 81425 - DNA, 20 bp, Artificial Sequence
  Description of Artificial Sequence: Synthetic oligonucleotide
  Target: SCNA; (+) strand; PAM type: YTN; PAM sequence: TTG
aatactgggccacactaatc

SEQ ID NO: 81426 - DNA, 20 bp, Artificial Sequence
  Description of Artificial Sequence: Synthetic oligonucleotide
  Target: SCNA; (+) strand; PAM type: YTN; PAM sequence: CTG
ggccacactaatcactagat

SEQ ID NO: 81427 - DNA, 20 bp, Artificial Sequence
  Description of Artificial Sequence: Synthetic oligonucleotide
  Target: SCNA; (+) strand; PAM type: YTN; PAM sequence: CTA
atcactagatactttaaata

SEQ ID NO: 81428 - DNA, 20 bp, Artificial Sequence
  Description of Artificial Sequence: Synthetic oligonucleotide
  Target: SCNA; (+) strand; PAM type: YTN; PAM sequence: CTA
gatactttaaatatcatctt

SEQ ID NO: 81429 - DNA, 20 bp, Artificial Sequence
  Description of Artificial Sequence: Synthetic oligonucleotide
  Target: SCNA; (+) strand; PAM type: YTN; PAM sequence: CTT
taaatatcatctttggatat

SEQ ID NO: 81430 - DNA, 20 bp, Artificial Sequence
  Description of Artificial Sequence: Synthetic oligonucleotide
  Target: SCNA; (+) strand; PAM type: YTN; PAM sequence: TTT
aaatatcatctttggatata

SEQ ID NO: 81431 - DNA, 20 bp, Artificial Sequence
  Description of Artificial Sequence: Synthetic oligonucleotide
  Target: SCNA; (+) strand; PAM type: YTN; PAM sequence: TTA
aatatcatctttggatataa

SEQ ID NO: 81432 - DNA, 20 bp, Artificial Sequence
  Description of Artificial Sequence: Synthetic oligonucleotide
  Target: SCNA; (+) strand; PAM type: YTN; PAM sequence: CTT
tggatataagcacaatggag

SEQ ID NO: 81433 - DNA, 20 bp, Artificial Sequence
  Description of Artificial Sequence: Synthetic oligonucleotide
  Target: SCNA; (+) strand; PAM type: YTN; PAM sequence: TTT
ggatataagcacaatggagc

SEQ ID NO: 81434 - DNA, 20 bp, Artificial Sequence
  Description of Artificial Sequence: Synthetic oligonucleotide
  Target: SCNA; (+) strand; PAM type: YTN; PAM sequence: TTG
gatataagcacaatggagct

SEQ ID NO: 81435 - DNA, 20 bp, Artificial Sequence
  Description of Artificial Sequence: Synthetic oligonucleotide
  Target: SCNA; (+) strand; PAM type: YTN; PAM sequence: CTT
acctgttgccacaccatgca

SEQ ID NO: 81436 - DNA, 20 bp, Artificial Sequence
  Description of Artificial Sequence: Synthetic oligonucleotide
  Target: SCNA; (+) strand; PAM type: YTN; PAM sequence: TTA
cctgttgccacaccatgcac

SEQ ID NO: 81437 - DNA, 20 bp, Artificial Sequence
  Description of Artificial Sequence: Synthetic oligonucleotide
  Target: SCNA; (+) strand; PAM type: YTN; PAM sequence: CTG
ttgccacaccatgcaccact

SEQ ID NO: 81438 - DNA, 20 bp, Artificial Sequence
  Description of Artificial Sequence: Synthetic oligonucleotide
  Target: SCNA; (+) strand; PAM type: YTN; PAM sequence: TTG
ccacaccatgcaccactccc

SEQ ID NO: 81439 - DNA, 20 bp, Artificial Sequence
  Description of Artificial Sequence: Synthetic oligonucleotide
  Target: SCNA; (+) strand; PAM type: YTN; PAM sequence: CTC
cctccttggttttggagcct

SEQ ID NO: 81440 - DNA, 20 bp, Artificial Sequence
  Description of Artificial Sequence: Synthetic oligonucleotide
  Target: SCNA; (+) strand; PAM type: YTN; PAM sequence: CTC
cttggttttggagcctacaa

SEQ ID NO: 81441 - DNA, 20 bp, Artificial Sequence
  Description of Artificial Sequence: Synthetic oligonucleotide
  Target: SCNA; (+) strand; PAM type: YTN; PAM sequence: CTT
ggttttggagcctacaaaaa

SEQ ID NO: 81442 - DNA, 20 bp, Artificial Sequence
  Description of Artificial Sequence: Synthetic oligonucleotide
  Target: SCNA; (+) strand; PAM type: YTN; PAM sequence: TTG
gttttggagcctacaaaaac

SEQ ID NO: 81443 - DNA, 20 bp, Artificial Sequence
  Description of Artificial Sequence: Synthetic oligonucleotide
  Target: SCNA; (+) strand; PAM type: YTN; PAM sequence: TTT
tggagcctacaaaaacaaat

SEQ ID NO: 81444 - DNA, 20 bp, Artificial Sequence
  Description of Artificial Sequence: Synthetic oligonucleotide
  Target: SCNA; (+) strand; PAM type: YTN; PAM sequence: TTT
ggagcctacaaaaacaaatt

SEQ ID NO: 81445 - DNA, 20 bp, Artificial Sequence
  Description of Artificial Sequence: Synthetic oligonucleotide
  Target: SCNA; (+) strand; PAM type: YTN; PAM sequence: TTG
gagcctacaaaaacaaattc

SEQ ID NO: 81446 - DNA, 20 bp, Artificial Sequence
  Description of Artificial Sequence: Synthetic oligonucleotide
  Target: SCNA; (+) strand; PAM type: YTN; PAM sequence: CTA
caaaaacaaattcaagacat

SEQ ID NO: 81447 - DNA, 20 bp, Artificial Sequence
  Description of Artificial Sequence: Synthetic oligonucleotide
  Target: SCNA; (+) strand; PAM type: YTN; PAM sequence: TTC
aagacataagtctcaagcta

SEQ ID NO: 81448 - DNA, 20 bp, Artificial Sequence
  Description of Artificial Sequence: Synthetic oligonucleotide
  Target: SCNA; (+) strand; PAM type: YTN; PAM sequence: CTC
aagctagccttaaattgctg

SEQ ID NO: 81449 - DNA, 20 bp, Artificial Sequence
  Description of Artificial Sequence: Synthetic oligonucleotide
  Target: SCNA; (+) strand; PAM type: YTN; PAM sequence: CTA
gccttaaattgctgattagc

SEQ ID NO: 81450 - DNA, 20 bp, Artificial Sequence
  Description of Artificial Sequence: Synthetic oligonucleotide
  Target: SCNA; (+) strand; PAM type: YTN; PAM sequence: CTT
aaattgctgattagctagtt

SEQ ID NO: 81451 - DNA, 20 bp, Artificial Sequence
  Description of Artificial Sequence: Synthetic oligonucleotide
  Target: SCNA; (+) strand; PAM type: YTN; PAM sequence: TTA
aattgctgattagctagttt

SEQ ID NO: 81452 - DNA, 20 bp, Artificial Sequence
  Description of Artificial Sequence: Synthetic oligonucleotide
  Target: SCNA; (+) strand; PAM type: YTN; PAM sequence: TTG
ctgattagctagttttcaat

SEQ ID NO: 81453 - DNA, 20 bp, Artificial Sequence
  Description of Artificial Sequence: Synthetic oligonucleotide
  Target: SCNA; (+) strand; PAM type: YTN; PAM sequence: CTG
attagctagttttcaataca

SEQ ID NO: 81454 - DNA, 20 bp, Artificial Sequence
  Description of Artificial Sequence: Synthetic oligonucleotide
  Target: SCNA; (+) strand; PAM type: YTN; PAM sequence: TTA
gctagttttcaatacaacta

SEQ ID NO: 81455 - DNA, 20 bp, Artificial Sequence
  Description of Artificial Sequence: Synthetic oligonucleotide
  Target: SCNA; (+) strand; PAM type: YTN; PAM sequence: CTA
gttttcaatacaactaattt

SEQ ID NO: 81456 - DNA, 20 bp, Artificial Sequence
  Description of Artificial Sequence: Synthetic oligonucleotide
  Target: SCNA; (+) strand; PAM type: YTN; PAM sequence: TTT
tcaatacaactaatttaaaa

SEQ ID NO: 81457 - DNA, 20 bp, Artificial Sequence
  Description of Artificial Sequence: Synthetic oligonucleotide
  Target: SCNA; (+) strand; PAM type: YTN; PAM sequence: TTT
caatacaactaatttaaaaa

SEQ ID NO: 81458 - DNA, 20 bp, Artificial Sequence
  Description of Artificial Sequence: Synthetic oligonucleotide
  Target: SCNA; (+) strand; PAM type: YTN; PAM sequence: TTC
aatacaactaatttaaaaat

SEQ ID NO: 81459 - DNA, 20 bp, Artificial Sequence
  Description of Artificial Sequence: Synthetic oligonucleotide
  Target: SCNA; (+) strand; PAM type: YTN; PAM sequence: CTA
atttaaaaatctcaatcttc

SEQ ID NO: 81460 - DNA, 20 bp, Artificial Sequence
  Description of Artificial Sequence: Synthetic oligonucleotide
  Target: SCNA; (+) strand; PAM type: YTN; PAM sequence: TTT
aaaaatctcaatcttcagaa

SEQ ID NO: 81461 - DNA, 20 bp, Artificial Sequence
  Description of Artificial Sequence: Synthetic oligonucleotide
  Target: SCNA; (+) strand; PAM type: YTN; PAM sequence: TTA
aaaatctcaatcttcagaag

SEQ ID NO: 81462 - DNA, 20 bp, Artificial Sequence
  Description of Artificial Sequence: Synthetic oligonucleotide
  Target: SCNA; (+) strand; PAM type: YTN; PAM sequence: CTC
aatcttcagaagtatatata

SEQ ID NO: 81463 - DNA, 20 bp, Artificial Sequence
  Description of Artificial Sequence: Synthetic oligonucleotide
  Target: SCNA; (+) strand; PAM type: YTN; PAM sequence: CTT
cagaagtatatatattatta

SEQ ID NO: 81464 - DNA, 20 bp, Artificial Sequence
  Description of Artificial Sequence: Synthetic oligonucleotide
  Target: SCNA; (+) strand; PAM type: YTN; PAM sequence: TTC
agaagtatatatattattat

SEQ ID NO: 81465 - DNA, 20 bp, Artificial Sequence
  Description of Artificial Sequence: Synthetic oligonucleotide
  Target: SCNA; (+) strand; PAM type: YTN; PAM sequence: TTA
ttatatcttcagggaaagaa

SEQ ID NO: 81466 - DNA, 20 bp, Artificial Sequence
  Description of Artificial Sequence: Synthetic oligonucleotide
  Target: SCNA; (+) strand; PAM type: YTN; PAM sequence: TTA
tatcttcagggaaagaaaaa

SEQ ID NO: 81467 - DNA, 20 bp, Artificial Sequence
  Description of Artificial Sequence: Synthetic oligonucleotide
  Target: SCNA; (+) strand; PAM type: YTN; PAM sequence: CTT
cagggaaagaaaaaaatata

SEQ ID NO: 81468 - DNA, 20 bp, Artificial Sequence
  Description of Artificial Sequence: Synthetic oligonucleotide
  Target: SCNA; (+) strand; PAM type: YTN; PAM sequence: TTC
agggaaagaaaaaaatatat

SEQ ID NO: 81469 - DNA, 20 bp, Artificial Sequence
  Description of Artificial Sequence: Synthetic oligonucleotide
  Target: SCNA; (+) strand; PAM type: YTN; PAM sequence: CTA
aaactagaagaaggaactcc

SEQ ID NO: 81470 - DNA, 20 bp, Artificial Sequence
  Description of Artificial Sequence: Synthetic oligonucleotide
  Target: SCNA; (+) strand; PAM type: YTN; PAM sequence: CTA
gaagaaggaactccagtaac

SEQ ID NO: 81471 - DNA, 20 bp, Artificial Sequence
  Description of Artificial Sequence: Synthetic oligonucleotide
  Target: SCNA; (+) strand; PAM type: YTN; PAM sequence: CTC
cagtaaccaccacaataaat

SEQ ID NO: 81472 - DNA, 20 bp, Artificial Sequence
  Description of Artificial Sequence: Synthetic oligonucleotide
  Target: SCNA; (+) strand; PAM type: YTN; PAM sequence: CTA
acaggaggtcctctccaatt

SEQ ID NO: 81473 - DNA, 20 bp, Artificial Sequence
  Description of Artificial Sequence: Synthetic oligonucleotide
  Target: SCNA; (+) strand; PAM type: YTN; PAM sequence: CTC
tccaattacgattttagcac

SEQ ID NO: 81474 - DNA, 20 bp, Artificial Sequence
  Description of Artificial Sequence: Synthetic oligonucleotide
  Target: SCNA; (+) strand; PAM type: YTN; PAM sequence: CTC
caattacgattttagcacaa

SEQ ID NO: 81475 - DNA, 20 bp, Artificial Sequence
  Description of Artificial Sequence: Synthetic oligonucleotide
  Target: SCNA; (+) strand; PAM type: YTN; PAM sequence: TTA
cgattttagcacaaaataat

SEQ ID NO: 81476 - DNA, 20 bp, Artificial Sequence
  Description of Artificial Sequence: Synthetic oligonucleotide
  Target: SCNA; (+) strand; PAM type: YTN; PAM sequence: TTT
tagcacaaaataatgacttt

SEQ ID NO: 81477 - DNA, 20 bp, Artificial Sequence
  Description of Artificial Sequence: Synthetic oligonucleotide
  Target: SCNA; (+) strand; PAM type: YTN; PAM sequence: TTT
agcacaaaataatgacttta

SEQ ID NO: 81478 - DNA, 20 bp, Artificial Sequence
  Description of Artificial Sequence: Synthetic oligonucleotide
  Target: SCNA; (+) strand; PAM type: YTN; PAM sequence: TTA
gcacaaaataatgactttat

SEQ ID NO: 81479 - DNA, 20 bp, Artificial Sequence
  Description of Artificial Sequence: Synthetic oligonucleotide
  Target: SCNA; (+) strand; PAM type: YTN; PAM sequence: CTT
tatcccctttgttcccacat

SEQ ID NO: 81480 - DNA, 20 bp, Artificial Sequence
  Description of Artificial Sequence: Synthetic oligonucleotide
  Target: SCNA; (+) strand; PAM type: YTN; PAM sequence: TTT
atcccctttgttcccacatc

SEQ ID NO: 81481 - DNA, 20 bp, Artificial Sequence
  Description of Artificial Sequence: Synthetic oligonucleotide
  Target: SCNA; (+) strand; PAM type: YTN; PAM sequence: TTA
tcccctttgttcccacatca

SEQ ID NO: 81482 - DNA, 20 bp, Artificial Sequence
  Description of Artificial Sequence: Synthetic oligonucleotide
  Target: SCNA; (+) strand; PAM type: YTN; PAM sequence: CTT
tgttcccacatcacatgtca

SEQ ID NO: 81483 - DNA, 20 bp, Artificial Sequence
  Description of Artificial Sequence: Synthetic oligonucleotide
  Target: SCNA; (+) strand; PAM type: YTN; PAM sequence: TTT
gttcccacatcacatgtcaa

SEQ ID NO: 81484 - DNA, 20 bp, Artificial Sequence
  Description of Artificial Sequence: Synthetic oligonucleotide
  Target: SCNA; (+) strand; PAM type: YTN; PAM sequence: TTG
ttcccacatcacatgtcaac

SEQ ID NO: 81485 - DNA, 20 bp, Artificial Sequence
  Description of Artificial Sequence: Synthetic oligonucleotide
  Target: SCNA; (+) strand; PAM type: YTN; PAM sequence: TTC
ccacatcacatgtcaactta

SEQ ID NO: 81486 - DNA, 20 bp, Artificial Sequence
  Description of Artificial Sequence: Synthetic oligonucleotide
  Target: SCNA; (+) strand; PAM type: YTN; PAM sequence: CTT
acagaggagaaaaaagaatg

SEQ ID NO: 81487 - DNA, 20 bp, Artificial Sequence
  Description of Artificial Sequence: Synthetic oligonucleotide
  Target: SCNA; (+) strand; PAM type: YTN; PAM sequence: TTA
cagaggagaaaaaagaatga

SEQ ID NO: 81488 - DNA, 20 bp, Artificial Sequence
  Description of Artificial Sequence: Synthetic oligonucleotide
  Target: SCNA; (+) strand; PAM type: YTN; PAM sequence: TTT
tgaattcagaactgtagaag

SEQ ID NO: 81489 - DNA, 20 bp, Artificial Sequence
  Description of Artificial Sequence: Synthetic oligonucleotide
  Target: SCNA; (+) strand; PAM type: YTN; PAM sequence: TTT
gaattcagaactgtagaagc

SEQ ID NO: 81490 - DNA, 20 bp, Artificial Sequence
  Description of Artificial Sequence: Synthetic oligonucleotide
  Target: SCNA; (+) strand; PAM type: YTN; PAM sequence: TTG
aattcagaactgtagaagct

SEQ ID NO: 81491 - DNA, 20 bp, Artificial Sequence
  Description of Artificial Sequence: Synthetic oligonucleotide
  Target: SCNA; (+) strand; PAM type: YTN; PAM sequence: TTC
agaactgtagaagctttaaa

SEQ ID NO: 81492 - DNA, 20 bp, Artificial Sequence
  Description of Artificial Sequence: Synthetic oligonucleotide
  Target: SCNA; (+) strand; PAM type: YTN; PAM sequence: CTG
tagaagctttaaaagtacag

SEQ ID NO: 81493 - DNA, 20 bp, Artificial Sequence
  Description of Artificial Sequence: Synthetic oligonucleotide
  Target: SCNA; (+) strand; PAM type: YTN; PAM sequence: CTT
taaaagtacagcactagaga

SEQ ID NO: 81494 - DNA, 20 bp, Artificial Sequence
  Description of Artificial Sequence: Synthetic oligonucleotide
  Target: SCNA; (+) strand; PAM type: YTN; PAM sequence: TTT
aaaagtacagcactagagac

SEQ ID NO: 81495 - DNA, 20 bp, Artificial Sequence
  Description of Artificial Sequence: Synthetic oligonucleotide
  Target: SCNA; (+) strand; PAM type: YTN; PAM sequence: TTA
aaagtacagcactagagaca

SEQ ID NO: 81496 - DNA, 20 bp, Artificial Sequence
  Description of Artificial Sequence: Synthetic oligonucleotide
  Target: SCNA; (+) strand; PAM type: YTN; PAM sequence: CTA
gagacagatcagtcaaccca

SEQ ID NO: 81497 - DNA, 20 bp, Artificial Sequence
  Description of Artificial Sequence: Synthetic oligonucleotide
  Target: SCNA; (+) strand; PAM type: YTN; PAM sequence: CTT
taacatgtgctgaacaccca

SEQ ID NO: 81498 - DNA, 20 bp, Artificial Sequence
  Description of Artificial Sequence: Synthetic oligonucleotide
  Target: SCNA; (+) strand; PAM type: YTN; PAM sequence: TTT
aacatgtgctgaacacccat

SEQ ID NO: 81499 - DNA, 20 bp, Artificial Sequence
  Description of Artificial Sequence: Synthetic oligonucleotide
  Target: SCNA; (+) strand; PAM type: YTN; PAM sequence: TTA
acatgtgctgaacacccatt

SEQ ID NO: 81500 - DNA, 20 bp, Artificial Sequence
  Description of Artificial Sequence: Synthetic oligonucleotide
  Target: SCNA; (+) strand; PAM type: YTN; PAM sequence: CTG
aacacccattatgtaaaaaa

SEQ ID NO: 81501 - DNA, 20 bp, Artificial Sequence
  Description of Artificial Sequence: Synthetic oligonucleotide
  Target: SCNA; (+) strand; PAM type: YTN; PAM sequence: TTA
tgtaaaaaaaacattttagg

SEQ ID NO: 81502 - DNA, 20 bp, Artificial Sequence
  Description of Artificial Sequence: Synthetic oligonucleotide
  Target: SCNA; (+) strand; PAM type: YTN; PAM sequence: TTT
taggctgggcgcagtggctc

SEQ ID NO: 81503 - DNA, 20 bp, Artificial Sequence
  Description of Artificial Sequence: Synthetic oligonucleotide
  Target: SCNA; (+) strand; PAM type: YTN; PAM sequence: TTT
aggctgggcgcagtggctca

SEQ ID NO: 81504 - DNA, 20 bp, Artificial Sequence
  Description of Artificial Sequence: Synthetic oligonucleotide
  Target: SCNA; (+) strand; PAM type: YTN; PAM sequence: TTA
ggctgggcgcagtggctcat

SEQ ID NO: 81505 - DNA, 20 bp, Artificial Sequence
  Description of Artificial Sequence: Synthetic oligonucleotide
  Target: SCNA; (+) strand; PAM type: YTN; PAM sequence: CTG
ggcgcagtggctcatgcctg

SEQ ID NO: 81506 - DNA, 20 bp, Artificial Sequence
  Description of Artificial Sequence: Synthetic oligonucleotide
  Target: SCNA; (+) strand; PAM type: YTN; PAM sequence: CTC
atgcctgtaatcccagcaat

SEQ ID NO: 81507 - DNA, 20 bp, Artificial Sequence
  Description of Artificial Sequence: Synthetic oligonucleotide
  Target: SCNA; (+) strand; PAM type: YTN; PAM sequence: CTG
taatcccagcaatttgggag

SEQ ID NO: 81508 - DNA, 20 bp, Artificial Sequence
  Description of Artificial Sequence: Synthetic oligonucleotide
  Target: SCNA; (+) strand; PAM type: YTN; PAM sequence: TTT
gggaggccgaggtgggcaga

SEQ ID NO: 81509 - DNA, 20 bp, Artificial Sequence
  Description of Artificial Sequence: Synthetic oligonucleotide
  Target: SCNA; (+) strand; PAM type: YTN; PAM sequence: TTG
ggaggccgaggtgggcagat

SEQ ID NO: 81510 - DNA, 20 bp, Artificial Sequence
  Description of Artificial Sequence: Synthetic oligonucleotide
  Target: SCNA; (+) strand; PAM type: YTN; PAM sequence: CTG
gctaatatggtgaaacccca

SEQ ID NO: 81511 - DNA, 20 bp, Artificial Sequence
  Description of Artificial Sequence: Synthetic oligonucleotide
  Target: SCNA; (+) strand; PAM type: YTN; PAM sequence: CTA
atatggtgaaaccccatctc

SEQ ID NO: 81512 - DNA, 20 bp, Artificial Sequence
  Description of Artificial Sequence: Synthetic oligonucleotide
  Target: SCNA; (+) strand; PAM type: YTN; PAM sequence: CTC
taccaaaaatacaaaaaatt

SEQ ID NO: 81513 - DNA, 20 bp, Artificial Sequence
  Description of Artificial Sequence: Synthetic oligonucleotide
  Target: SCNA; (+) strand; PAM type: YTN; PAM sequence: CTA
ccaaaaatacaaaaaattag

SEQ ID NO: 81514 - DNA, 20 bp, Artificial Sequence
  Description of Artificial Sequence: Synthetic oligonucleotide
  Target: SCNA; (+) strand; PAM type: YTN; PAM sequence: TTA
gccaggcgtggtggcgggtg

SEQ ID NO: 81515 - DNA, 20 bp, Artificial Sequence
  Description of Artificial Sequence: Synthetic oligonucleotide
  Target: SCNA; (+) strand; PAM type: YTN; PAM sequence: CTG
tagtcccagctacttgggag

SEQ ID NO: 81516 - DNA, 20 bp, Artificial Sequence
  Description of Artificial Sequence: Synthetic oligonucleotide
  Target: SCNA; (+) strand; PAM type: YTN; PAM sequence: CTA
cttgggaggggctgaggcag

SEQ ID NO: 81517 - DNA, 20 bp, Artificial Sequence
  Description of Artificial Sequence: Synthetic oligonucleotide
  Target: SCNA; (+) strand; PAM type: YTN; PAM sequence: CTT
gggaggggctgaggcaggag

SEQ ID NO: 81518 - DNA, 20 bp, Artificial Sequence
  Description of Artificial Sequence: Synthetic oligonucleotide
  Target: SCNA; (+) strand; PAM type: YTN; PAM sequence: TTG
ggaggggctgaggcaggaga

SEQ ID NO: 81519 - DNA, 20 bp, Artificial Sequence
  Description of Artificial Sequence: Synthetic oligonucleotide
  Target: SCNA; (+) strand; PAM type: YTN; PAM sequence: CTG
aggcaggagaatggcatgaa

SEQ ID NO: 81520 - DNA, 20 bp, Artificial Sequence
  Description of Artificial Sequence: Synthetic oligonucleotide
  Target: SCNA; (+) strand; PAM type: YTN; PAM sequence: CTC
gggaggcagaacttgcagtg

SEQ ID NO: 81521 - DNA, 20 bp, Artificial Sequence
  Description of Artificial Sequence: Synthetic oligonucleotide
  Target: SCNA; (+) strand; PAM type: YTN; PAM sequence: CTT
gcagtgagccaagattgtgc

SEQ ID NO: 81522 - DNA, 20 bp, Artificial Sequence
  Description of Artificial Sequence: Synthetic oligonucleotide
  Target: SCNA; (+) strand; PAM type: YTN; PAM sequence: TTG
cagtgagccaagattgtgcc

SEQ ID NO: 81523 - DNA, 20 bp, Artificial Sequence
  Description of Artificial Sequence: Synthetic oligonucleotide
  Target: SCNA; (+) strand; PAM type: YTN; PAM sequence: TTG
tgccactgcactccagcctg

SEQ ID NO: 81524 - DNA, 20 bp, Artificial Sequence
  Description of Artificial Sequence: Synthetic oligonucleotide
  Target: SCNA; (+) strand; PAM type: YTN; PAM sequence: CTG
cactccagcctgggtaacag

SEQ ID NO: 81525 - DNA, 20 bp, Artificial Sequence
  Description of Artificial Sequence: Synthetic oligonucleotide
  Target: SCNA; (+) strand; PAM type: YTN; PAM sequence: CTC
cagcctgggtaacagagcaa

SEQ ID NO: 81526 - DNA, 20 bp, Artificial Sequence
  Description of Artificial Sequence: Synthetic oligonucleotide
  Target: SCNA; (+) strand; PAM type: YTN; PAM sequence: CTG
ggtaacagagcaagactctg

SEQ ID NO: 81527 - DNA, 20 bp, Artificial Sequence
  Description of Artificial Sequence: Synthetic oligonucleotide
  Target: SCNA; (+) strand; PAM type: YTN; PAM sequence: CTC
tgtctcaaaaaaacaaacag

SEQ ID NO: 81528 - DNA, 20 bp, Artificial Sequence
  Description of Artificial Sequence: Synthetic oligonucleotide
  Target: SCNA; (+) strand; PAM type: YTN; PAM sequence: CTG
tctcaaaaaaacaaacagac

SEQ ID NO: 81529 - DNA, 20 bp, Artificial Sequence
  Description of Artificial Sequence: Synthetic oligonucleotide
  Target: SCNA; (+) strand; PAM type: YTN; PAM sequence: CTC
aaaaaaacaaacagacaaac

SEQ ID NO: 81530 - DNA, 20 bp, Artificial Sequence
  Description of Artificial Sequence: Synthetic oligonucleotide
  Target: SCNA; (+) strand; PAM type: YTN; PAM sequence: TTT
tacatatcatcttatttaat

SEQ ID NO: 81531 - DNA, 20 bp, Artificial Sequence
  Description of Artificial Sequence: Synthetic oligonucleotide
  Target: SCNA; (+) strand; PAM type: YTN; PAM sequence: TTT
acatatcatcttatttaatc

SEQ ID NO: 81532 - DNA, 20 bp, Artificial Sequence
  Description of Artificial Sequence: Synthetic oligonucleotide
  Target: SCNA; (+) strand; PAM type: YTN; PAM sequence: TTA
catatcatcttatttaatct

SEQ ID NO: 81533 - DNA, 20 bp, Artificial Sequence
  Description of Artificial Sequence: Synthetic oligonucleotide
  Target: SCNA; (+) strand; PAM type: YTN; PAM sequence: CTT
atttaatcttcataacagcc

SEQ ID NO: 81534 - DNA, 20 bp, Artificial Sequence
  Description of Artificial Sequence: Synthetic oligonucleotide
  Target: SCNA; (+) strand; PAM type: YTN; PAM sequence: TTA
tttaatcttcataacagcca

SEQ ID NO: 81535 - DNA, 20 bp, Artificial Sequence
  Description of Artificial Sequence: Synthetic oligonucleotide
  Target: SCNA; (+) strand; PAM type: YTN; PAM sequence: TTT
aatcttcataacagccattt

SEQ ID NO: 81536 - DNA, 20 bp, Artificial Sequence
  Description of Artificial Sequence: Synthetic oligonucleotide
  Target: SCNA; (+) strand; PAM type: YTN; PAM sequence: TTA
atcttcataacagccattta

SEQ ID NO: 81537 - DNA, 20 bp, Artificial Sequence
  Description of Artificial Sequence: Synthetic oligonucleotide
  Target: SCNA; (+) strand; PAM type: YTN; PAM sequence: CTT
cataacagccatttaatata

SEQ ID NO: 81538 - DNA, 20 bp, Artificial Sequence
  Description of Artificial Sequence: Synthetic oligonucleotide
  Target: SCNA; (+) strand; PAM type: YTN; PAM sequence: TTC
ataacagccatttaatatag

SEQ ID NO: 81539 - DNA, 20 bp, Artificial Sequence
  Description of Artificial Sequence: Synthetic oligonucleotide
  Target: SCNA; (+) strand; PAM type: YTN; PAM sequence: TTT
aatatagttatattatgccc

SEQ ID NO: 81540 - DNA, 20 bp, Artificial Sequence
  Description of Artificial Sequence: Synthetic oligonucleotide
  Target: SCNA; (+) strand; PAM type: YTN; PAM sequence: TTA
atatagttatattatgccca

SEQ ID NO: 81541 - DNA, 20 bp, Artificial Sequence
  Description of Artificial Sequence: Synthetic oligonucleotide
  Target: SCNA; (+) strand; PAM type: YTN; PAM sequence: TTA
tattatgcccattttaaata

SEQ ID NO: 81542 - DNA, 20 bp, Artificial Sequence
  Description of Artificial Sequence: Synthetic oligonucleotide
  Target: SCNA; (+) strand; PAM type: YTN; PAM sequence: TTA
tgcccattttaaatagctga

SEQ ID NO: 81543 - DNA, 20 bp, Artificial Sequence
  Description of Artificial Sequence: Synthetic oligonucleotide
  Target: SCNA; (+) strand; PAM type: YTN; PAM sequence: TTT
taaatagctgatgaaattaa

SEQ ID NO: 81544 - DNA, 20 bp, Artificial Sequence
  Description of Artificial Sequence: Synthetic oligonucleotide
  Target: SCNA; (+) strand; PAM type: YTN; PAM sequence: TTT
aaatagctgatgaaattaaa

SEQ ID NO: 81545 - DNA, 20 bp, Artificial Sequence
  Description of Artificial Sequence: Synthetic oligonucleotide
  Target: SCNA; (+) strand; PAM type: YTN; PAM sequence: TTA
aatagctgatgaaattaaaa

SEQ ID NO: 81546 - DNA, 20 bp, Artificial Sequence
  Description of Artificial Sequence: Synthetic oligonucleotide
  Target: SCNA; (+) strand; PAM type: YTN; PAM sequence: CTG
atgaaattaaaaatccgagt

SEQ ID NO: 81547 - DNA, 20 bp, Artificial Sequence
  Description of Artificial Sequence: Synthetic oligonucleotide
  Target: SCNA; (+) strand; PAM type: YTN; PAM sequence: TTA
aaaatccgagttaagtaatt

SEQ ID NO: 81548 - DNA, 20 bp, Artificial Sequence
  Description of Artificial Sequence: Synthetic oligonucleotide
  Target: SCNA; (+) strand; PAM type: YTN; PAM sequence: TTA
agtaatttatgtaacattac

SEQ ID NO: 81549 - DNA, 20 bp, Artificial Sequence
  Description of Artificial Sequence: Synthetic oligonucleotide
  Target: SCNA; (+) strand; PAM type: YTN; PAM sequence: TTT
atgtaacattacacatgtaa

SEQ ID NO: 81550 - DNA, 20 bp, Artificial Sequence
  Description of Artificial Sequence: Synthetic oligonucleotide
  Target: SCNA; (+) strand; PAM type: YTN; PAM sequence: TTA
tgtaacattacacatgtaat

SEQ ID NO: 81551 - DNA, 20 bp, Artificial Sequence
  Description of Artificial Sequence: Synthetic oligonucleotide
  Target: SCNA; (+) strand; PAM type: YTN; PAM sequence: TTA
cacatgtaataataggctat

SEQ ID NO: 81552 - DNA, 20 bp, Artificial Sequence
  Description of Artificial Sequence: Synthetic oligonucleotide
  Target: SCNA; (+) strand; PAM type: YTN; PAM sequence: CTA
taagcacattcaaactaggg

SEQ ID NO: 81553 - DNA, 20 bp, Artificial Sequence
  Description of Artificial Sequence: Synthetic oligonucleotide
  Target: SCNA; (+) strand; PAM type: YTN; PAM sequence: TTC
aaactagggtctctacacag

SEQ ID NO: 81554 - DNA, 20 bp, Artificial Sequence
  Description of Artificial Sequence: Synthetic oligonucleotide
  Target: SCNA; (+) strand; PAM type: YTN; PAM sequence: CTA
gggtctctacacaggatcag

SEQ ID NO: 81555 - DNA, 20 bp, Artificial Sequence
  Description of Artificial Sequence: Synthetic oligonucleotide
  Target: SCNA; (+) strand; PAM type: YTN; PAM sequence: CTC
tacacaggatcagaatttct

SEQ ID NO: 81556 - DNA, 20 bp, Artificial Sequence
  Description of Artificial Sequence: Synthetic oligonucleotide
  Target: SCNA; (+) strand; PAM type: YTN; PAM sequence: CTA
cacaggatcagaatttcttc

SEQ ID NO: 81557 - DNA, 20 bp, Artificial Sequence
  Description of Artificial Sequence: Synthetic oligonucleotide
  Target: SCNA; (+) strand; PAM type: YTN; PAM sequence: TTT
cttccaaaccttgaacatta

SEQ ID NO: 81558 - DNA, 20 bp, Artificial Sequence
  Description of Artificial Sequence: Synthetic oligonucleotide
  Target: SCNA; (+) strand; PAM type: YTN; PAM sequence: TTC
ttccaaaccttgaacattac

SEQ ID NO: 81559 - DNA, 20 bp, Artificial Sequence
  Description of Artificial Sequence: Synthetic oligonucleotide
  Target: SCNA; (+) strand; PAM type: YTN; PAM sequence: CTT
ccaaaccttgaacattacta

SEQ ID NO: 81560 - DNA, 20 bp, Artificial Sequence
  Description of Artificial Sequence: Synthetic oligonucleotide
  Target: SCNA; (+) strand; PAM type: YTN; PAM sequence: TTC
caaaccttgaacattactaa

SEQ ID NO: 81561 - DNA, 20 bp, Artificial Sequence
  Description of Artificial Sequence: Synthetic oligonucleotide
  Target: SCNA; (+) strand; PAM type: YTN; PAM sequence: CTT
gaacattactaaacttgaat

SEQ ID NO: 81562 - DNA, 20 bp, Artificial Sequence
  Description of Artificial Sequence: Synthetic oligonucleotide
  Target: SCNA; (+) strand; PAM type: YTN; PAM sequence: TTG
aacattactaaacttgaata

SEQ ID NO: 81563 - DNA, 20 bp, Artificial Sequence
  Description of Artificial Sequence: Synthetic oligonucleotide
  Target: SCNA; (+) strand; PAM type: YTN; PAM sequence: TTA
ctaaacttgaatacaaataa

SEQ ID NO: 81564 - DNA, 20 bp, Artificial Sequence
  Description of Artificial Sequence: Synthetic oligonucleotide
  Target: SCNA; (+) strand; PAM type: YTN; PAM sequence: CTA
aacttgaatacaaataatta

SEQ ID NO: 81565 - DNA, 20 bp, Artificial Sequence
  Description of Artificial Sequence: Synthetic oligonucleotide
  Target: SCNA; (+) strand; PAM type: YTN; PAM sequence: CTT
gaatacaaataattattatg

SEQ ID NO: 81566 - DNA, 20 bp, Artificial Sequence
  Description of Artificial Sequence: Synthetic oligonucleotide
  Target: SCNA; (+) strand; PAM type: YTN; PAM sequence: TTG
aatacaaataattattatgt

SEQ ID NO: 81567 - DNA, 20 bp, Artificial Sequence
  Description of Artificial Sequence: Synthetic oligonucleotide
  Target: SCNA; (+) strand; PAM type: YTN; PAM sequence: TTA
ttatgtgtattattaaaatt

SEQ ID NO: 81568 - DNA, 20 bp, Artificial Sequence
  Description of Artificial Sequence: Synthetic oligonucleotide
  Target: SCNA; (+) strand; PAM type: YTN; PAM sequence: TTA
tgtgtattattaaaattatg

SEQ ID NO: 81569 - DNA, 20 bp, Artificial Sequence
  Description of Artificial Sequence: Synthetic oligonucleotide
  Target: SCNA; (+) strand; PAM type: YTN; PAM sequence: TTA
ttaaaattatgcttgtaaaa

SEQ ID NO: 81570 - DNA, 20 bp, Artificial Sequence
  Description of Artificial Sequence: Synthetic oligonucleotide
  Target: SCNA; (+) strand; PAM type: YTN; PAM sequence: TTA
aaattatgcttgtaaaaaat

SEQ ID NO: 81571 - DNA, 20 bp, Artificial Sequence
  Description of Artificial Sequence: Synthetic oligonucleotide
  Target: SCNA; (+) strand; PAM type: YTN; PAM sequence: TTA
tgcttgtaaaaaattgtatt

SEQ ID NO: 81572 - DNA, 20 bp, Artificial Sequence
  Description of Artificial Sequence: Synthetic oligonucleotide
  Target: SCNA; (+) strand; PAM type: YTN; PAM sequence: CTT
gtaaaaaattgtattcatat

SEQ ID NO: 81573 - DNA, 20 bp, Artificial Sequence
  Description of Artificial Sequence: Synthetic oligonucleotide
  Target: SCNA; (+) strand; PAM type: YTN; PAM sequence: TTG
taaaaaattgtattcatatc

SEQ ID NO: 81574 - DNA, 20 bp, Artificial Sequence
  Description of Artificial Sequence: Synthetic oligonucleotide
  Target: SCNA; (+) strand; PAM type: YTN; PAM sequence: TTG
tattcatatcctctctaatg

SEQ ID NO: 81575 - DNA, 20 bp, Artificial Sequence
  Description of Artificial Sequence: Synthetic oligonucleotide
  Target: SCNA; (+) strand; PAM type: YTN; PAM sequence: TTC
atatcctctctaatgttgga

SEQ ID NO: 81576 - DNA, 20 bp, Artificial Sequence
  Description of Artificial Sequence: Synthetic oligonucleotide
  Target: SCNA; (+) strand; PAM type: YTN; PAM sequence: CTC
tctaatgttggatttttcag

SEQ ID NO: 81577 - DNA, 20 bp, Artificial Sequence
  Description of Artificial Sequence: Synthetic oligonucleotide
  Target: SCNA; (+) strand; PAM type: YTN; PAM sequence: CTC
taatgttggatttttcagtg

SEQ ID NO: 81578 - DNA, 20 bp, Artificial Sequence
  Description of Artificial Sequence: Synthetic oligonucleotide
  Target: SCNA; (+) strand; PAM type: YTN; PAM sequence: CTA
atgttggatttttcagtgta

SEQ ID NO: 81579 - DNA, 20 bp, Artificial Sequence
  Description of Artificial Sequence: Synthetic oligonucleotide
  Target: SCNA; (+) strand; PAM type: YTN; PAM sequence: TTG
gatttttcagtgtaattcac

SEQ ID NO: 81580 - DNA, 20 bp, Artificial Sequence
  Description of Artificial Sequence: Synthetic oligonucleotide
  Target: SCNA; (+) strand; PAM type: YTN; PAM sequence: TTT
ttcagtgtaattcacactgt

SEQ ID NO: 81581 - DNA, 20 bp, Artificial Sequence
  Description of Artificial Sequence: Synthetic oligonucleotide
  Target: SCNA; (+) strand; PAM type: YTN; PAM sequence: TTT
tcagtgtaattcacactgta

SEQ ID NO: 81582 - DNA, 20 bp, Artificial Sequence
  Description of Artificial Sequence: Synthetic oligonucleotide
  Target: SCNA; (+) strand; PAM type: YTN; PAM sequence: TTT
cagtgtaattcacactgtat

SEQ ID NO: 81583 - DNA, 20 bp, Artificial Sequence
  Description of Artificial Sequence: Synthetic oligonucleotide
  Target: SCNA; (+) strand; PAM type: YTN; PAM sequence: TTC
agtgtaattcacactgtata

SEQ ID NO: 81584 - DNA, 20 bp, Artificial Sequence
  Description of Artificial Sequence: Synthetic oligonucleotide
  Target: SCNA; (+) strand; PAM type: YTN; PAM sequence: TTC
acactgtataatttatggaa

SEQ ID NO: 81585 - DNA, 20 bp, Artificial Sequence
  Description of Artificial Sequence: Synthetic oligonucleotide
  Target: SCNA; (+) strand; PAM type: YTN; PAM sequence: CTG
tataatttatggaatcggca

SEQ ID NO: 81586 - DNA, 20 bp, Artificial Sequence
  Description of Artificial Sequence: Synthetic oligonucleotide
  Target: SCNA; (+) strand; PAM type: YTN; PAM sequence: TTT
atggaatcggcatgattttt

SEQ ID NO: 81587 - DNA, 20 bp, Artificial Sequence
  Description of Artificial Sequence: Synthetic oligonucleotide
  Target: SCNA; (+) strand; PAM type: YTN; PAM sequence: TTA
tggaatcggcatgattttta

SEQ ID NO: 81588 - DNA, 20 bp, Artificial Sequence
  Description of Artificial Sequence: Synthetic oligonucleotide
  Target: SCNA; (+) strand; PAM type: YTN; PAM sequence: TTT
ttatgttttacagaattatc

SEQ ID NO: 81589 - DNA, 20 bp, Artificial Sequence
  Description of Artificial Sequence: Synthetic oligonucleotide
  Target: SCNA; (+) strand; PAM type: YTN; PAM sequence: TTT
tatgttttacagaattatca

SEQ ID NO: 81590 - DNA, 20 bp, Artificial Sequence
  Description of Artificial Sequence: Synthetic oligonucleotide
  Target: SCNA; (+) strand; PAM type: YTN; PAM sequence: TTT
atgttttacagaattatcat

SEQ ID NO: 81591 - DNA, 20 bp, Artificial Sequence
  Description of Artificial Sequence: Synthetic oligonucleotide
  Target: SCNA; (+) strand; PAM type: YTN; PAM sequence: TTA
tgttttacagaattatcata

SEQ ID NO: 81592 - DNA, 20 bp, Artificial Sequence
  Description of Artificial Sequence: Synthetic oligonucleotide
  Target: SCNA; (+) strand; PAM type: YTN; PAM sequence: TTT
tacagaattatcatactcct

SEQ ID NO: 81593 - DNA, 20 bp, Artificial Sequence
  Description of Artificial Sequence: Synthetic oligonucleotide
  Target: SCNA; (+) strand; PAM type: YTN; PAM sequence: TTT
acagaattatcatactcctt

SEQ ID NO: 81594 - DNA, 20 bp, Artificial Sequence
  Description of Artificial Sequence: Synthetic oligonucleotide
  Target: SCNA; (+) strand; PAM type: YTN; PAM sequence: TTA
cagaattatcatactccttt

SEQ ID NO: 81595 - DNA, 20 bp, Artificial Sequence
  Description of Artificial Sequence: Synthetic oligonucleotide
  Target: SCNA; (+) strand; PAM type: YTN; PAM sequence: TTA
tcatactcctttttaagttt

SEQ ID NO: 81596 - DNA, 20 bp, Artificial Sequence
  Description of Artificial Sequence: Synthetic oligonucleotide
  Target: SCNA; (+) strand; PAM type: YTN; PAM sequence: CTC
ctttttaagtttggatcagt

SEQ ID NO: 81597 - DNA, 20 bp, Artificial Sequence
  Description of Artificial Sequence: Synthetic oligonucleotide
  Target: SCNA; (+) strand; PAM type: YTN; PAM sequence: CTT
tttaagtttggatcagttta

SEQ ID NO: 81598 - DNA, 20 bp, Artificial Sequence
  Description of Artificial Sequence: Synthetic oligonucleotide
  Target: SCNA; (+) strand; PAM type: YTN; PAM sequence: TTT
ttaagtttggatcagtttac

SEQ ID NO: 81599 - DNA, 20 bp, Artificial Sequence
  Description of Artificial Sequence: Synthetic oligonucleotide
  Target: SCNA; (+) strand; PAM type: YTN; PAM sequence: TTT
taagtttggatcagtttaca

SEQ ID NO: 81600 - DNA, 20 bp, Artificial Sequence
  Description of Artificial Sequence: Synthetic oligonucleotide
  Target: SCNA; (+) strand; PAM type: YTN; PAM sequence: TTT
aagtttggatcagtttacaa

SEQ ID NO: 81601 - DNA, 20 bp, Artificial Sequence
  Description of Artificial Sequence: Synthetic oligonucleotide
  Target: SCNA; (+) strand; PAM type: YTN; PAM sequence: TTA
agtttggatcagtttacaaa

SEQ ID NO: 81602 - DNA, 20 bp, Artificial Sequence
  Description of Artificial Sequence: Synthetic oligonucleotide
  Target: SCNA; (+) strand; PAM type: YTN; PAM sequence: TTT
ggatcagtttacaaaatgtt

SEQ ID NO: 81603 - DNA, 20 bp, Artificial Sequence
  Description of Artificial Sequence: Synthetic oligonucleotide
  Target: SCNA; (+) strand; PAM type: YTN; PAM sequence: TTG
gatcagtttacaaaatgtta

SEQ ID NO: 81604 - DNA, 20 bp, Artificial Sequence
  Description of Artificial Sequence: Synthetic oligonucleotide
  Target: SCNA; (+) strand; PAM type: YTN; PAM sequence: TTT
acaaaatgttatcatttgca

SEQ ID NO: 81605 - DNA, 20 bp, Artificial Sequence
  Description of Artificial Sequence: Synthetic oligonucleotide
  Target: SCNA; (+) strand; PAM type: YTN; PAM sequence: TTA
caaaatgttatcatttgcac

SEQ ID NO: 81606 - DNA, 20 bp, Artificial Sequence
  Description of Artificial Sequence: Synthetic oligonucleotide
  Target: SCNA; (+) strand; PAM type: YTN; PAM sequence: TTA
tcatttgcactttaatgtca

SEQ ID NO: 81607 - DNA, 20 bp, Artificial Sequence
  Description of Artificial Sequence: Synthetic oligonucleotide
  Target: SCNA; (+) strand; PAM type: YTN; PAM sequence: TTT
gcactttaatgtcatgatat

SEQ ID NO: 81608 - DNA, 20 bp, Artificial Sequence
  Description of Artificial Sequence: Synthetic oligonucleotide
  Target: SCNA; (+) strand; PAM type: YTN; PAM sequence: TTG
cactttaatgtcatgatata

SEQ ID NO: 81609 - DNA, 20 bp, Artificial Sequence
  Description of Artificial Sequence: Synthetic oligonucleotide
  Target: SCNA; (+) strand; PAM type: YTN; PAM sequence: CTT
taatgtcatgatatactgac

SEQ ID NO: 81610 - DNA, 20 bp, Artificial Sequence
  Description of Artificial Sequence: Synthetic oligonucleotide
  Target: SCNA; (+) strand; PAM type: YTN; PAM sequence: TTT
aatgtcatgatatactgaca

SEQ ID NO: 81611 - DNA, 20 bp, Artificial Sequence
  Description of Artificial Sequence: Synthetic oligonucleotide
  Target: SCNA; (+) strand; PAM type: YTN; PAM sequence: TTA
atgtcatgatatactgacag

SEQ ID NO: 81612 - DNA, 20 bp, Artificial Sequence
  Description of Artificial Sequence: Synthetic oligonucleotide
  Target: SCNA; (+) strand; PAM type: YTN; PAM sequence: CTG
acagtgtatttaacataagg

SEQ ID NO: 81613 - DNA, 20 bp, Artificial Sequence
  Description of Artificial Sequence: Synthetic oligonucleotide
  Target: SCNA; (+) strand; PAM type: YTN; PAM sequence: TTT
aacataaggtgtatttttca

SEQ ID NO: 81614 - DNA, 20 bp, Artificial Sequence
  Description of Artificial Sequence: Synthetic oligonucleotide
  Target: SCNA; (+) strand; PAM type: YTN; PAM sequence: TTA
acataaggtgtatttttcag

SEQ ID NO: 81615 - DNA, 20 bp, Artificial Sequence
  Description of Artificial Sequence: Synthetic oligonucleotide
  Target: SCNA; (+) strand; PAM type: YTN; PAM sequence: TTT
ttcagcaacacttcctctgg

SEQ ID NO: 81616 - DNA, 20 bp, Artificial Sequence
  Description of Artificial Sequence: Synthetic oligonucleotide
  Target: SCNA; (+) strand; PAM type: YTN; PAM sequence: TTT
tcagcaacacttcctctggg

SEQ ID NO: 81617 - DNA, 20 bp, Artificial Sequence
  Description of Artificial Sequence: Synthetic oligonucleotide
  Target: SCNA; (+) strand; PAM type: YTN; PAM sequence: TTT
cagcaacacttcctctggga

SEQ ID NO: 81618 - DNA, 20 bp, Artificial Sequence
  Description of Artificial Sequence: Synthetic oligonucleotide
  Target: SCNA; (+) strand; PAM type: YTN; PAM sequence: TTC
agcaacacttcctctgggac

SEQ ID NO: 81619 - DNA, 20 bp, Artificial Sequence
  Description of Artificial Sequence: Synthetic oligonucleotide
  Target: SCNA; (+) strand; PAM type: YTN; PAM sequence: CTT
cctctgggacaccttcactc

SEQ ID NO: 81620 - DNA, 20 bp, Artificial Sequence
  Description of Artificial Sequence: Synthetic oligonucleotide
  Target: SCNA; (+) strand; PAM type: YTN; PAM sequence: TTC
ctctgggacaccttcactct

SEQ ID NO: 81621 - DNA, 20 bp, Artificial Sequence
  Description of Artificial Sequence: Synthetic oligonucleotide
  Target: SCNA; (+) strand; PAM type: YTN; PAM sequence: CTC
tgggacaccttcactcttta

SEQ ID NO: 81622 - DNA, 20 bp, Artificial Sequence
  Description of Artificial Sequence: Synthetic oligonucleotide
  Target: SCNA; (+) strand; PAM type: YTN; PAM sequence: CTG
ggacaccttcactctttatc

SEQ ID NO: 81623 - DNA, 20 bp, Artificial Sequence
  Description of Artificial Sequence: Synthetic oligonucleotide
  Target: SCNA; (+) strand; PAM type: YTN; PAM sequence: CTT
cactctttatcacaacctct

SEQ ID NO: 81624 - DNA, 20 bp, Artificial Sequence
  Description of Artificial Sequence: Synthetic oligonucleotide
  Target: SCNA; (+) strand; PAM type: YTN; PAM sequence: TTC
actctttatcacaacctctt

SEQ ID NO: 81625 - DNA, 20 bp, Artificial Sequence
  Description of Artificial Sequence: Synthetic oligonucleotide
  Target: SCNA; (+) strand; PAM type: YTN; PAM sequence: CTC
tttatcacaacctctttccc

SEQ ID NO: 81626 - DNA, 20 bp, Artificial Sequence
  Description of Artificial Sequence: Synthetic oligonucleotide
  Target: SCNA; (+) strand; PAM type: YTN; PAM sequence: CTT
tatcacaacctctttcccca

SEQ ID NO: 81627 - DNA, 20 bp, Artificial Sequence
  Description of Artificial Sequence: Synthetic oligonucleotide
  Target: SCNA; (+) strand; PAM type: YTN; PAM sequence: TTT
atcacaacctctttccccat

SEQ ID NO: 81628 - DNA, 20 bp, Artificial Sequence
  Description of Artificial Sequence: Synthetic oligonucleotide
  Target: SCNA; (+) strand; PAM type: YTN; PAM sequence: TTA
tcacaacctctttccccatt

SEQ ID NO: 81629 - DNA, 20 bp, Artificial Sequence
  Description of Artificial Sequence: Synthetic oligonucleotide
  Target: SCNA; (+) strand; PAM type: YTN; PAM sequence: CTC
tttccccattatacggatac

SEQ ID NO: 81630 - DNA, 20 bp, Artificial Sequence
  Description of Artificial Sequence: Synthetic oligonucleotide
  Target: SCNA; (+) strand; PAM type: YTN; PAM sequence: CTT
tccccattatacggatacct

SEQ ID NO: 81631 - DNA, 20 bp, Artificial Sequence
  Description of Artificial Sequence: Synthetic oligonucleotide
  Target: SCNA; (+) strand; PAM type: YTN; PAM sequence: TTT
ccccattatacggatacctt

SEQ ID NO: 81632 - DNA, 20 bp, Artificial Sequence
  Description of Artificial Sequence: Synthetic oligonucleotide
  Target: SCNA; (+) strand; PAM type: YTN; PAM sequence: TTC
cccattatacggataccttc

SEQ ID NO: 81633 - DNA, 20 bp, Artificial Sequence
  Description of Artificial Sequence: Synthetic oligonucleotide
  Target: SCNA; (+) strand; PAM type: YTN; PAM sequence: TTA
tacggataccttcacctcac

SEQ ID NO: 81634 - DNA, 20 bp, Artificial Sequence
  Description of Artificial Sequence: Synthetic oligonucleotide
  Target: SCNA; (+) strand; PAM type: YTN; PAM sequence: CTT
cacctcactacgttcctctg

SEQ ID NO: 81635 - DNA, 20 bp, Artificial Sequence
  Description of Artificial Sequence: Synthetic oligonucleotide
  Target: SCNA; (+) strand; PAM type: YTN; PAM sequence: TTC
acctcactacgttcctctga

SEQ ID NO: 81636 - DNA, 20 bp, Artificial Sequence
  Description of Artificial Sequence: Synthetic oligonucleotide
  Target: SCNA; (+) strand; PAM type: YTN; PAM sequence: CTC
actacgttcctctgactgca

SEQ ID NO: 81637 - DNA, 20 bp, Artificial Sequence
  Description of Artificial Sequence: Synthetic oligonucleotide
  Target: SCNA; (+) strand; PAM type: YTN; PAM sequence: CTA
cgttcctctgactgcatatt

SEQ ID NO: 81638 - DNA, 20 bp, Artificial Sequence
  Description of Artificial Sequence: Synthetic oligonucleotide
  Target: SCNA; (+) strand; PAM type: YTN; PAM sequence: TTC
ctctgactgcatatttagag

SEQ ID NO: 81639 - DNA, 20 bp, Artificial Sequence
  Description of Artificial Sequence: Synthetic oligonucleotide
  Target: SCNA; (+) strand; PAM type: YTN; PAM sequence: CTC
tgactgcatatttagagtct

SEQ ID NO: 81640 - DNA, 20 bp, Artificial Sequence
  Description of Artificial Sequence: Synthetic oligonucleotide
  Target: SCNA; (+) strand; PAM type: YTN; PAM sequence: CTG
actgcatatttagagtctcc

SEQ ID NO: 81641 - DNA, 20 bp, Artificial Sequence
  Description of Artificial Sequence: Synthetic oligonucleotide
  Target: SCNA; (+) strand; PAM type: YTN; PAM sequence: CTG
catatttagagtctcctgaa

SEQ ID NO: 81642 - DNA, 20 bp, Artificial Sequence
  Description of Artificial Sequence: Synthetic oligonucleotide
  Target: SCNA; (+) strand; PAM type: YTN; PAM sequence: TTT
agagtctcctgaattgcagc

SEQ ID NO: 81643 - DNA, 20 bp, Artificial Sequence
  Description of Artificial Sequence: Synthetic oligonucleotide
  Target: SCNA; (+) strand; PAM type: YTN; PAM sequence: TTA
gagtctcctgaattgcagca

SEQ ID NO: 81644 - DNA, 20 bp, Artificial Sequence
  Description of Artificial Sequence: Synthetic oligonucleotide
  Target: SCNA; (+) strand; PAM type: YTN; PAM sequence: CTC
ctgaattgcagcagtgacaa

SEQ ID NO: 81645 - DNA, 20 bp, Artificial Sequence
  Description of Artificial Sequence: Synthetic oligonucleotide
  Target: SCNA; (+) strand; PAM type: YTN; PAM sequence: CTG
aattgcagcagtgacaacat

SEQ ID NO: 81646 - DNA, 20 bp, Artificial Sequence
  Description of Artificial Sequence: Synthetic oligonucleotide
  Target: SCNA; (+) strand; PAM type: YTN; PAM sequence: TTG
cagcagtgacaacatcctca

SEQ ID NO: 81647 - DNA, 20 bp, Artificial Sequence
  Description of Artificial Sequence: Synthetic oligonucleotide
  Target: SCNA; (+) strand; PAM type: YTN; PAM sequence: CTC
agggtagctacttcctgtat

SEQ ID NO: 81648 - DNA, 20 bp, Artificial Sequence
  Description of Artificial Sequence: Synthetic oligonucleotide
  Target: SCNA; (+) strand; PAM type: YTN; PAM sequence: CTA
cttcctgtatacatcaactt

SEQ ID NO: 81649 - DNA, 20 bp, Artificial Sequence
  Description of Artificial Sequence: Synthetic oligonucleotide
  Target: SCNA; (+) strand; PAM type: YTN; PAM sequence: CTT
cctgtatacatcaacttatg

SEQ ID NO: 81650 - DNA, 20 bp, Artificial Sequence
  Description of Artificial Sequence: Synthetic oligonucleotide
  Target: SCNA; (+) strand; PAM type: YTN; PAM sequence: TTC
ctgtatacatcaacttatgt

SEQ ID NO: 81651 - DNA, 20 bp, Artificial Sequence
  Description of Artificial Sequence: Synthetic oligonucleotide
  Target: SCNA; (+) strand; PAM type: YTN; PAM sequence: CTG
tatacatcaacttatgtttg

SEQ ID NO: 81652 - DNA, 20 bp, Artificial Sequence
  Description of Artificial Sequence: Synthetic oligonucleotide
  Target: SCNA; (+) strand; PAM type: YTN; PAM sequence: CTT
atgtttgattcaaattttac

SEQ ID NO: 81653 - DNA, 20 bp, Artificial Sequence
  Description of Artificial Sequence: Synthetic oligonucleotide
  Target: SCNA; (+) strand; PAM type: YTN; PAM sequence: TTA
tgtttgattcaaattttact

SEQ ID NO: 81654 - DNA, 20 bp, Artificial Sequence
  Description of Artificial Sequence: Synthetic oligonucleotide
  Target: SCNA; (+) strand; PAM type: YTN; PAM sequence: TTT
gattcaaattttacttccag

SEQ ID NO: 81655 - DNA, 20 bp, Artificial Sequence
  Description of Artificial Sequence: Synthetic oligonucleotide
  Target: SCNA; (+) strand; PAM type: YTN; PAM sequence: TTG
attcaaattttacttccaga

SEQ ID NO: 81656 - DNA, 20 bp, Artificial Sequence
  Description of Artificial Sequence: Synthetic oligonucleotide
  Target: SCNA; (+) strand; PAM type: YTN; PAM sequence: TTC
aaattttacttccagaatgt

SEQ ID NO: 81657 - DNA, 20 bp, Artificial Sequence
  Description of Artificial Sequence: Synthetic oligonucleotide
  Target: SCNA; (+) strand; PAM type: YTN; PAM sequence: TTT
tacttccagaatgtttcact

SEQ ID NO: 81658 - DNA, 20 bp, Artificial Sequence
  Description of Artificial Sequence: Synthetic oligonucleotide
  Target: SCNA; (+) strand; PAM type: YTN; PAM sequence: TTT
acttccagaatgtttcactt

SEQ ID NO: 81659 - DNA, 20 bp, Artificial Sequence
  Description of Artificial Sequence: Synthetic oligonucleotide
  Target: SCNA; (+) strand; PAM type: YTN; PAM sequence: TTA
cttccagaatgtttcacttc

SEQ ID NO: 81660 - DNA, 20 bp, Artificial Sequence
  Description of Artificial Sequence: Synthetic oligonucleotide
  Target: SCNA; (+) strand; PAM type: YTN; PAM sequence: CTT
ccagaatgtttcacttcctt

SEQ ID NO: 81661 - DNA, 20 bp, Artificial Sequence
  Description of Artificial Sequence: Synthetic oligonucleotide
  Target: SCNA; (+) strand; PAM type: YTN; PAM sequence: TTC
cagaatgtttcacttccttt

SEQ ID NO: 81662 - DNA, 20 bp, Artificial Sequence
  Description of Artificial Sequence: Synthetic oligonucleotide
  Target: SCNA; (+) strand; PAM type: YTN; PAM sequence: TTT
cacttcctttgtttgctact

SEQ ID NO: 81663 - DNA, 20 bp, Artificial Sequence
  Description of Artificial Sequence: Synthetic oligonucleotide
  Target: SCNA; (+) strand; PAM type: YTN; PAM sequence: TTC
acttcctttgtttgctactc

SEQ ID NO: 81664 - DNA, 20 bp, Artificial Sequence
  Description of Artificial Sequence: Synthetic oligonucleotide
  Target: SCNA; (+) strand; PAM type: YTN; PAM sequence: CTT
cctttgtttgctactctttc

SEQ ID NO: 81665 - DNA, 20 bp, Artificial Sequence
  Description of Artificial Sequence: Synthetic oligonucleotide
  Target: SCNA; (+) strand; PAM type: YTN; PAM sequence: TTC
ctttgtttgctactctttca

SEQ ID NO: 81666 - DNA, 20 bp, Artificial Sequence
  Description of Artificial Sequence: Synthetic oligonucleotide
  Target: SCNA; (+) strand; PAM type: YTN; PAM sequence: CTT
tgtttgctactctttcatct

SEQ ID NO: 81667 - DNA, 20 bp, Artificial Sequence
  Description of Artificial Sequence: Synthetic oligonucleotide
  Target: SCNA; (+) strand; PAM type: YTN; PAM sequence: TTT
gtttgctactctttcatctt

SEQ ID NO: 81668 - DNA, 20 bp, Artificial Sequence
  Description of Artificial Sequence: Synthetic oligonucleotide
  Target: SCNA; (+) strand; PAM type: YTN; PAM sequence: TTG
tttgctactctttcatcttt

SEQ ID NO: 81669 - DNA, 20 bp, Artificial Sequence
  Description of Artificial Sequence: Synthetic oligonucleotide
  Target: SCNA; (+) strand; PAM type: YTN; PAM sequence: TTT
gctactctttcatctttgct

SEQ ID NO: 81670 - DNA, 20 bp, Artificial Sequence
  Description of Artificial Sequence: Synthetic oligonucleotide
  Target: SCNA; (+) strand; PAM type: YTN; PAM sequence: TTG
ctactctttcatctttgctg

SEQ ID NO: 81671 - DNA, 20 bp, Artificial Sequence
  Description of Artificial Sequence: Synthetic oligonucleotide
  Target: SCNA; (+) strand; PAM type: YTN; PAM sequence: CTA
ctctttcatctttgctggcc

SEQ ID NO: 81672 - DNA, 20 bp, Artificial Sequence
  Description of Artificial Sequence: Synthetic oligonucleotide
  Target: SCNA; (+) strand; PAM type: YTN; PAM sequence: CTC
tttcatctttgctggccagt

SEQ ID NO: 81673 - DNA, 20 bp, Artificial Sequence
  Description of Artificial Sequence: Synthetic oligonucleotide
  Target: SCNA; (+) strand; PAM type: YTN; PAM sequence: CTT
tcatctttgctggccagttt

SEQ ID NO: 81674 - DNA, 20 bp, Artificial Sequence
  Description of Artificial Sequence: Synthetic oligonucleotide
  Target: SCNA; (+) strand; PAM type: YTN; PAM sequence: TTT
catctttgctggccagtttc

SEQ ID NO: 81675 - DNA, 20 bp, Artificial Sequence
  Description of Artificial Sequence: Synthetic oligonucleotide
  Target: SCNA; (+) strand; PAM type: YTN; PAM sequence: TTC
atctttgctggccagtttcc

SEQ ID NO: 81676 - DNA, 20 bp, Artificial Sequence
  Description of Artificial Sequence: Synthetic oligonucleotide
  Target: SCNA; (+) strand; PAM type: YTN; PAM sequence: CTT
tgctggccagtttcctcttt

SEQ ID NO: 81677 - DNA, 20 bp, Artificial Sequence
  Description of Artificial Sequence: Synthetic oligonucleotide
  Target: SCNA; (+) strand; PAM type: YTN; PAM sequence: TTT
gctggccagtttcctctttt

SEQ ID NO: 81678 - DNA, 20 bp, Artificial Sequence
  Description of Artificial Sequence: Synthetic oligonucleotide
  Target: SCNA; (+) strand; PAM type: YTN; PAM sequence: TTG
ctggccagtttcctcttttg

SEQ ID NO: 81679 - DNA, 20 bp, Artificial Sequence
  Description of Artificial Sequence: Synthetic oligonucleotide
  Target: SCNA; (+) strand; PAM type: YTN; PAM sequence: CTG
gccagtttcctcttttgatt

SEQ ID NO: 81680 - DNA, 20 bp, Artificial Sequence
  Description of Artificial Sequence: Synthetic oligonucleotide
  Target: SCNA; (+) strand; PAM type: YTN; PAM sequence: TTT
cctcttttgattgcgcattt

SEQ ID NO: 81681 - DNA, 20 bp, Artificial Sequence
  Description of Artificial Sequence: Synthetic oligonucleotide
  Target: SCNA; (+) strand; PAM type: YTN; PAM sequence: TTC
ctcttttgattgcgcatttt

SEQ ID NO: 81682 - DNA, 20 bp, Artificial Sequence
  Description of Artificial Sequence: Synthetic oligonucleotide
  Target: SCNA; (+) strand; PAM type: YTN; PAM sequence: CTC
ttttgattgcgcattttcgt

SEQ ID NO: 81683 - DNA, 20 bp, Artificial Sequence
  Description of Artificial Sequence: Synthetic oligonucleotide
  Target: SCNA; (+) strand; PAM type: YTN; PAM sequence: CTT
ttgattgcgcattttcgtga

SEQ ID NO: 81684 - DNA, 20 bp, Artificial Sequence
  Description of Artificial Sequence: Synthetic oligonucleotide
  Target: SCNA; (+) strand; PAM type: YTN; PAM sequence: TTT
tgattgcgcattttcgtgaa

SEQ ID NO: 81685 - DNA, 20 bp, Artificial Sequence
  Description of Artificial Sequence: Synthetic oligonucleotide
  Target: SCNA; (+) strand; PAM type: YTN; PAM sequence: TTT
gattgcgcattttcgtgaaa

SEQ ID NO: 81686 - DNA, 20 bp, Artificial Sequence
  Description of Artificial Sequence: Synthetic oligonucleotide
  Target: SCNA; (+) strand; PAM type: YTN; PAM sequence: TTG
attgcgcattttcgtgaaac

SEQ ID NO: 81687 - DNA, 20 bp, Artificial Sequence
  Description of Artificial Sequence: Synthetic oligonucleotide
  Target: SCNA; (+) strand; PAM type: YTN; PAM sequence: TTG
cgcattttcgtgaaacatca

SEQ ID NO: 81688 - DNA, 20 bp, Artificial Sequence
  Description of Artificial Sequence: Synthetic oligonucleotide
  Target: SCNA; (+) strand; PAM type: YTN; PAM sequence: TTT
tcgtgaaacatcacatgggc

SEQ ID NO: 81689 - DNA, 20 bp, Artificial Sequence
  Description of Artificial Sequence: Synthetic oligonucleotide
  Target: SCNA; (+) strand; PAM type: YTN; PAM sequence: TTT
cgtgaaacatcacatgggct

SEQ ID NO: 81690 - DNA, 20 bp, Artificial Sequence
  Description of Artificial Sequence: Synthetic oligonucleotide
  Target: SCNA; (+) strand; PAM type: YTN; PAM sequence: TTC
gtgaaacatcacatgggctc

SEQ ID NO: 81691 - DNA, 20 bp, Artificial Sequence
  Description of Artificial Sequence: Synthetic oligonucleotide
  Target: SCNA; (+) strand; PAM type: YTN; PAM sequence: CTC
accactgggagacaatgtgg

SEQ ID NO: 81692 - DNA, 20 bp, Artificial Sequence
  Description of Artificial Sequence: Synthetic oligonucleotide
  Target: SCNA; (+) strand; PAM type: YTN; PAM sequence: CTG
ggagacaatgtggccacaca

SEQ ID NO: 81693 - DNA, 20 bp, Artificial Sequence
  Description of Artificial Sequence: Synthetic oligonucleotide
  Target: SCNA; (+) strand; PAM type: YTN; PAM sequence: TTG
ctgtctgtatgaactgcata

SEQ ID NO: 81694 - DNA, 20 bp, Artificial Sequence
  Description of Artificial Sequence: Synthetic oligonucleotide
  Target: SCNA; (+) strand; PAM type: YTN; PAM sequence: CTG
tctgtatgaactgcataaca

SEQ ID NO: 81695 - DNA, 20 bp, Artificial Sequence
  Description of Artificial Sequence: Synthetic oligonucleotide
  Target: SCNA; (+) strand; PAM type: YTN; PAM sequence: CTG
tatgaactgcataacagatg

SEQ ID NO: 81696 - DNA, 20 bp, Artificial Sequence
  Description of Artificial Sequence: Synthetic oligonucleotide
  Target: SCNA; (+) strand; PAM type: YTN; PAM sequence: CTG
cataacagatgtgaagcaac

SEQ ID NO: 81697 - DNA, 20 bp, Artificial Sequence
  Description of Artificial Sequence: Synthetic oligonucleotide
  Target: SCNA; (+) strand; PAM type: YTN; PAM sequence: CTC
caaaaagctttgaaagaagt

SEQ ID NO: 81698 - DNA, 20 bp, Artificial Sequence
  Description of Artificial Sequence: Synthetic oligonucleotide
  Target: SCNA; (+) strand; PAM type: YTN; PAM sequence: CTT
tgaaagaagtgctgtggttt

SEQ ID NO: 81699 - DNA, 20 bp, Artificial Sequence
  Description of Artificial Sequence: Synthetic oligonucleotide
  Target: SCNA; (+) strand; PAM type: YTN; PAM sequence: TTT
gaaagaagtgctgtggtttt

SEQ ID NO: 81700 - DNA, 20 bp, Artificial Sequence
  Description of Artificial Sequence: Synthetic oligonucleotide
  Target: SCNA; (+) strand; PAM type: YTN; PAM sequence: TTG
aaagaagtgctgtggttttg

SEQ ID NO: 81701 - DNA, 20 bp, Artificial Sequence
  Description of Artificial Sequence: Synthetic oligonucleotide
  Target: SCNA; (+) strand; PAM type: YTN; PAM sequence: CTG
tggttttgtcactgattata

SEQ ID NO: 81702 - DNA, 20 bp, Artificial Sequence
  Description of Artificial Sequence: Synthetic oligonucleotide
  Target: SCNA; (+) strand; PAM type: YTN; PAM sequence: TTT
tgtcactgattataatgggt

SEQ ID NO: 81703 - DNA, 20 bp, Artificial Sequence
  Description of Artificial Sequence: Synthetic oligonucleotide
  Target: SCNA; (+) strand; PAM type: YTN; PAM sequence: TTT
gtcactgattataatgggtt

SEQ ID NO: 81704 - DNA, 20 bp, Artificial Sequence
  Description of Artificial Sequence: Synthetic oligonucleotide
  Target: SCNA; (+) strand; PAM type: YTN; PAM sequence: TTG
tcactgattataatgggttt

SEQ ID NO: 81705 - DNA, 20 bp, Artificial Sequence
  Description of Artificial Sequence: Synthetic oligonucleotide
  Target: SCNA; (+) strand; PAM type: YTN; PAM sequence: CTG
attataatgggtttctgtta

SEQ ID NO: 81706 - DNA, 20 bp, Artificial Sequence
  Description of Artificial Sequence: Synthetic oligonucleotide
  Target: SCNA; (+) strand; PAM type: YTN; PAM sequence: TTA
taatgggtttctgttattta

SEQ ID NO: 81707 - DNA, 20 bp, Artificial Sequence
  Description of Artificial Sequence: Synthetic oligonucleotide
  Target: SCNA; (+) strand; PAM type: YTN; PAM sequence: TTT
ctgttatttatgtaatgatt

SEQ ID NO: 81708 - DNA, 20 bp, Artificial Sequence
  Description of Artificial Sequence: Synthetic oligonucleotide
  Target: SCNA; (+) strand; PAM type: YTN; PAM sequence: TTC
tgttatttatgtaatgattt

SEQ ID NO: 81709 - DNA, 20 bp, Artificial Sequence
  Description of Artificial Sequence: Synthetic oligonucleotide
  Target: SCNA; (+) strand; PAM type: YTN; PAM sequence: CTG
ttatttatgtaatgatttga

SEQ ID NO: 81710 - DNA, 20 bp, Artificial Sequence
  Description of Artificial Sequence: Synthetic oligonucleotide
  Target: SCNA; (+) strand; PAM type: YTN; PAM sequence: TTA
tttatgtaatgatttgaagg

SEQ ID NO: 81711 - DNA, 20 bp, Artificial Sequence
  Description of Artificial Sequence: Synthetic oligonucleotide
  Target: SCNA; (+) strand; PAM type: YTN; PAM sequence: TTT
atgtaatgatttgaaggctg

SEQ ID NO: 81712 - DNA, 20 bp, Artificial Sequence
  Description of Artificial Sequence: Synthetic oligonucleotide
  Target: SCNA; (+) strand; PAM type: YTN; PAM sequence: TTA
tgtaatgatttgaaggctga

SEQ ID NO: 81713 - DNA, 20 bp, Artificial Sequence
  Description of Artificial Sequence: Synthetic oligonucleotide
  Target: SCNA; (+) strand; PAM type: YTN; PAM sequence: TTT
gaaggctgaagagttagcag

SEQ ID NO: 81714 - DNA, 20 bp, Artificial Sequence
  Description of Artificial Sequence: Synthetic oligonucleotide
  Target: SCNA; (+) strand; PAM type: YTN; PAM sequence: TTG
aaggctgaagagttagcagc

SEQ ID NO: 81715 - DNA, 20 bp, Artificial Sequence
  Description of Artificial Sequence: Synthetic oligonucleotide
  Target: SCNA; (+) strand; PAM type: YTN; PAM sequence: CTG
aagagttagcagcaaagttt

SEQ ID NO: 81716 - DNA, 20 bp, Artificial Sequence
  Description of Artificial Sequence: Synthetic oligonucleotide
  Target: SCNA; (+) strand; PAM type: YTN; PAM sequence: TTA
gcagcaaagtttgtacttta

SEQ ID NO: 81717 - DNA, 20 bp, Artificial Sequence
  Description of Artificial Sequence: Synthetic oligonucleotide
  Target: SCNA; (+) strand; PAM type: YTN; PAM sequence: TTT
gtactttatgcaatgacttt

SEQ ID NO: 81718 - DNA, 20 bp, Artificial Sequence
  Description of Artificial Sequence: Synthetic oligonucleotide
  Target: SCNA; (+) strand; PAM type: YTN; PAM sequence: TTG
tactttatgcaatgactttc

SEQ ID NO: 81719 - DNA, 20 bp, Artificial Sequence
  Description of Artificial Sequence: Synthetic oligonucleotide
  Target: SCNA; (+) strand; PAM type: YTN; PAM sequence: CTT
tatgcaatgactttcggtat

SEQ ID NO: 81720 - DNA, 20 bp, Artificial Sequence
  Description of Artificial Sequence: Synthetic oligonucleotide
  Target: SCNA; (+) strand; PAM type: YTN; PAM sequence: TTT
atgcaatgactttcggtata

SEQ ID NO: 81721 - DNA, 20 bp, Artificial Sequence
  Description of Artificial Sequence: Synthetic oligonucleotide
  Target: SCNA; (+) strand; PAM type: YTN; PAM sequence: TTA
tgcaatgactttcggtatac

SEQ ID NO: 81722 - DNA, 20 bp, Artificial Sequence
  Description of Artificial Sequence: Synthetic oligonucleotide
  Target: SCNA; (+) strand; PAM type: YTN; PAM sequence: CTT
tcggtatactgtggtaacag

SEQ ID NO: 81723 - DNA, 20 bp, Artificial Sequence
  Description of Artificial Sequence: Synthetic oligonucleotide
  Target: SCNA; (+) strand; PAM type: YTN; PAM sequence: TTT
cggtatactgtggtaacaga

SEQ ID NO: 81724 - DNA, 20 bp, Artificial Sequence
  Description of Artificial Sequence: Synthetic oligonucleotide
  Target: SCNA; (+) strand; PAM type: YTN; PAM sequence: TTC
ggtatactgtggtaacagaa

SEQ ID NO: 81725 - DNA, 20 bp, Artificial Sequence
  Description of Artificial Sequence: Synthetic oligonucleotide
  Target: SCNA; (+) strand; PAM type: YTN; PAM sequence: CTG
tggtaacagaaatttgaatt

SEQ ID NO: 81726 - DNA, 20 bp, Artificial Sequence
  Description of Artificial Sequence: Synthetic oligonucleotide
  Target: SCNA; (+) strand; PAM type: YTN; PAM sequence: TTT
gaattgtgttgttagtggct

SEQ ID NO: 81727 - DNA, 20 bp, Artificial Sequence
  Description of Artificial Sequence: Synthetic oligonucleotide
  Target: SCNA; (+) strand; PAM type: YTN; PAM sequence: TTG
aattgtgttgttagtggctg

SEQ ID NO: 81728 - DNA, 20 bp, Artificial Sequence
  Description of Artificial Sequence: Synthetic oligonucleotide
  Target: SCNA; (+) strand; PAM type: YTN; PAM sequence: TTG
tgttgttagtggctggtgtt

SEQ ID NO: 81729 - DNA, 20 bp, Artificial Sequence
  Description of Artificial Sequence: Synthetic oligonucleotide
  Target: SCNA; (+) strand; PAM type: YTN; PAM sequence: TTG
ttagtggctggtgttattta

SEQ ID NO: 81730 - DNA, 20 bp, Artificial Sequence
  Description of Artificial Sequence: Synthetic oligonucleotide
  Target: SCNA; (+) strand; PAM type: YTN; PAM sequence: TTA
gtggctggtgttatttaact

SEQ ID NO: 81731 - DNA, 20 bp, Artificial Sequence
  Description of Artificial Sequence: Synthetic oligonucleotide
  Target: SCNA; (+) strand; PAM type: YTN; PAM sequence: CTG
gtgttatttaactaaccata

SEQ ID NO: 81732 - DNA, 20 bp, Artificial Sequence
  Description of Artificial Sequence: Synthetic oligonucleotide
  Target: SCNA; (+) strand; PAM type: YTN; PAM sequence: TTA
tttaactaaccatagtacct

SEQ ID NO: 81733 - DNA, 20 bp, Artificial Sequence
  Description of Artificial Sequence: Synthetic oligonucleotide
  Target: SCNA; (+) strand; PAM type: YTN; PAM sequence: TTT
aactaaccatagtacctgga

SEQ ID NO: 81734 - DNA, 20 bp, Artificial Sequence
  Description of Artificial Sequence: Synthetic oligonucleotide
  Target: SCNA; (+) strand; PAM type: YTN; PAM sequence: TTA
actaaccatagtacctggaa

SEQ ID NO: 81735 - DNA, 20 bp, Artificial Sequence
  Description of Artificial Sequence: Synthetic oligonucleotide
  Target: SCNA; (+) strand; PAM type: YTN; PAM sequence: CTA
accatagtacctggaatttg

SEQ ID NO: 81736 - DNA, 20 bp, Artificial Sequence
  Description of Artificial Sequence: Synthetic oligonucleotide
  Target: SCNA; (+) strand; PAM type: YTN; PAM sequence: CTG
gaatttgtttgtgctggaac

SEQ ID NO: 81737 - DNA, 20 bp, Artificial Sequence
  Description of Artificial Sequence: Synthetic oligonucleotide
  Target: SCNA; (+) strand; PAM type: YTN; PAM sequence: TTT
gtttgtgctggaactatgca

SEQ ID NO: 81738 - DNA, 20 bp, Artificial Sequence
  Description of Artificial Sequence: Synthetic oligonucleotide
  Target: SCNA; (+) strand; PAM type: YTN; PAM sequence: TTG
tttgtgctggaactatgcag

SEQ ID NO: 81739 - DNA, 20 bp, Artificial Sequence
  Description of Artificial Sequence: Synthetic oligonucleotide
  Target: SCNA; (+) strand; PAM type: YTN; PAM sequence: TTT
gtgctggaactatgcagagt

SEQ ID NO: 81740 - DNA, 20 bp, Artificial Sequence
  Description of Artificial Sequence: Synthetic oligonucleotide
  Target: SCNA; (+) strand; PAM type: YTN; PAM sequence: TTG
tgctggaactatgcagagtg

SEQ ID NO: 81741 - DNA, 20 bp, Artificial Sequence
  Description of Artificial Sequence: Synthetic oligonucleotide
  Target: SCNA; (+) strand; PAM type: YTN; PAM sequence: CTG
gaactatgcagagtgagaac

SEQ ID NO: 81742 - DNA, 20 bp, Artificial Sequence
  Description of Artificial Sequence: Synthetic oligonucleotide
  Target: SCNA; (+) strand; PAM type: YTN; PAM sequence: CTA
tgcagagtgagaacagctga

SEQ ID NO: 81743 - DNA, 20 bp, Artificial Sequence
  Description of Artificial Sequence: Synthetic oligonucleotide
  Target: SCNA; (+) strand; PAM type: YTN; PAM sequence: CTG
atatttaagagaatatgttt

SEQ ID NO: 81744 - DNA, 20 bp, Artificial Sequence
  Description of Artificial Sequence: Synthetic oligonucleotide
  Target: SCNA; (+) strand; PAM type: YTN; PAM sequence: TTT
aagagaatatgtttcaatct

SEQ ID NO: 81745 - DNA, 20 bp, Artificial Sequence
  Description of Artificial Sequence: Synthetic oligonucleotide
  Target: SCNA; (+) strand; PAM type: YTN; PAM sequence: TTA
agagaatatgtttcaatctc

SEQ ID NO: 81746 - DNA, 20 bp, Artificial Sequence
  Description of Artificial Sequence: Synthetic oligonucleotide
  Target: SCNA; (+) strand; PAM type: YTN; PAM sequence: TTT
caatctctatctctcatcct

SEQ ID NO: 81747 - DNA, 20 bp, Artificial Sequence
  Description of Artificial Sequence: Synthetic oligonucleotide
  Target: SCNA; (+) strand; PAM type: YTN; PAM sequence: TTC
aatctctatctctcatcctc

SEQ ID NO: 81748 - DNA, 20 bp, Artificial Sequence
  Description of Artificial Sequence: Synthetic oligonucleotide
  Target: SCNA; (+) strand; PAM type: YTN; PAM sequence: CTC
tatctctcatcctcaccacc

SEQ ID NO: 81749 - DNA, 20 bp, Artificial Sequence
  Description of Artificial Sequence: Synthetic oligonucleotide
  Target: SCNA; (+) strand; PAM type: YTN; PAM sequence: CTA
tctctcatcctcaccacctg

SEQ ID NO: 81750 - DNA, 20 bp, Artificial Sequence
  Description of Artificial Sequence: Synthetic oligonucleotide
  Target: SCNA; (+) strand; PAM type: YTN; PAM sequence: CTC
tcatcctcaccacctgcacc

SEQ ID NO: 81751 - DNA, 20 bp, Artificial Sequence
  Description of Artificial Sequence: Synthetic oligonucleotide
  Target: SCNA; (+) strand; PAM type: YTN; PAM sequence: CTC
atcctcaccacctgcacccc

SEQ ID NO: 81752 - DNA, 20 bp, Artificial Sequence
  Description of Artificial Sequence: Synthetic oligonucleotide
  Target: SCNA; (+) strand; PAM type: YTN; PAM sequence: CTC
accacctgcaccccatgttg

SEQ ID NO: 81753 - DNA, 20 bp, Artificial Sequence
  Description of Artificial Sequence: Synthetic oligonucleotide
  Target: SCNA; (+) strand; PAM type: YTN; PAM sequence: CTG
caccccatgttgtcttaaaa

SEQ ID NO: 81754 - DNA, 20 bp, Artificial Sequence
  Description of Artificial Sequence: Synthetic oligonucleotide
  Target: SCNA; (+) strand; PAM type: YTN; PAM sequence: TTG
tcttaaaaatgactagtagt

SEQ ID NO: 81755 - DNA, 20 bp, Artificial Sequence
  Description of Artificial Sequence: Synthetic oligonucleotide
  Target: SCNA; (+) strand; PAM type: YTN; PAM sequence: CTT
aaaaatgactagtagtaaga

SEQ ID NO: 81756 - DNA, 20 bp, Artificial Sequence
  Description of Artificial Sequence: Synthetic oligonucleotide
  Target: SCNA; (+) strand; PAM type: YTN; PAM sequence: TTA
aaaatgactagtagtaagaa

SEQ ID NO: 81757 - DNA, 20 bp, Artificial Sequence
  Description of Artificial Sequence: Synthetic oligonucleotide
  Target: SCNA; (+) strand; PAM type: YTN; PAM sequence: CTA
gtagtaagaaatgtctaaca

SEQ ID NO: 81758 - DNA, 20 bp, Artificial Sequence
  Description of Artificial Sequence: Synthetic oligonucleotide
  Target: SCNA; (+) strand; PAM type: YTN; PAM sequence: CTA
acagctggaatgcgatcttt

SEQ ID NO: 81759 - DNA, 20 bp, Artificial Sequence
  Description of Artificial Sequence: Synthetic oligonucleotide
  Target: SCNA; (+) strand; PAM type: YTN; PAM sequence: CTG
gaatgcgatctttgttcttt

SEQ ID NO: 81760 - DNA, 20 bp, Artificial Sequence
  Description of Artificial Sequence: Synthetic oligonucleotide
  Target: SCNA; (+) strand; PAM type: YTN; PAM sequence: CTT
tgttctttgccttagcagta

SEQ ID NO: 81761 - DNA, 20 bp, Artificial Sequence
  Description of Artificial Sequence: Synthetic oligonucleotide
  Target: SCNA; (+) strand; PAM type: YTN; PAM sequence: TTT
gttctttgccttagcagtac

SEQ ID NO: 81762 - DNA, 20 bp, Artificial Sequence
  Description of Artificial Sequence: Synthetic oligonucleotide
  Target: SCNA; (+) strand; PAM type: YTN; PAM sequence: TTG
ttctttgccttagcagtacc

SEQ ID NO: 81763 - DNA, 20 bp, Artificial Sequence
  Description of Artificial Sequence: Synthetic oligonucleotide
  Target: SCNA; (+) strand; PAM type: YTN; PAM sequence: TTC
tttgccttagcagtacctaa

SEQ ID NO: 81764 - DNA, 20 bp, Artificial Sequence
  Description of Artificial Sequence: Synthetic oligonucleotide
  Target: SCNA; (+) strand; PAM type: YTN; PAM sequence: CTT
tgccttagcagtacctaaga

SEQ ID NO: 81765 - DNA, 20 bp, Artificial Sequence
  Description of Artificial Sequence: Synthetic oligonucleotide
  Target: SCNA; (+) strand; PAM type: YTN; PAM sequence: TTT
gccttagcagtacctaagaa

SEQ ID NO: 81766 - DNA, 20 bp, Artificial Sequence
  Description of Artificial Sequence: Synthetic oligonucleotide
  Target: SCNA; (+) strand; PAM type: YTN; PAM sequence: TTG
ccttagcagtacctaagaat

SEQ ID NO: 81767 - DNA, 20 bp, Artificial Sequence
  Description of Artificial Sequence: Synthetic oligonucleotide
  Target: SCNA; (+) strand; PAM type: YTN; PAM sequence: CTT
agcagtacctaagaatttga

SEQ ID NO: 81768 - DNA, 20 bp, Artificial Sequence
  Description of Artificial Sequence: Synthetic oligonucleotide
  Target: SCNA; (+) strand; PAM type: YTN; PAM sequence: TTA
gcagtacctaagaatttgac

SEQ ID NO: 81769 - DNA, 20 bp, Artificial Sequence
  Description of Artificial Sequence: Synthetic oligonucleotide
  Target: SCNA; (+) strand; PAM type: YTN; PAM sequence: CTA
agaatttgacctttggttaa

SEQ ID NO: 81770 - DNA, 20 bp, Artificial Sequence
  Description of Artificial Sequence: Synthetic oligonucleotide
  Target: SCNA; (+) strand; PAM type: YTN; PAM sequence: TTT
gacctttggttaaattatga

SEQ ID NO: 81771 - DNA, 20 bp, Artificial Sequence
  Description of Artificial Sequence: Synthetic oligonucleotide
  Target: SCNA; (+) strand; PAM type: YTN; PAM sequence: TTG
acctttggttaaattatgaa

SEQ ID NO: 81772 - DNA, 20 bp, Artificial Sequence
  Description of Artificial Sequence: Synthetic oligonucleotide
  Target: SCNA; (+) strand; PAM type: YTN; PAM sequence: CTT
tggttaaattatgaaacata

SEQ ID NO: 81773 - DNA, 20 bp, Artificial Sequence
  Description of Artificial Sequence: Synthetic oligonucleotide
  Target: SCNA; (+) strand; PAM type: YTN; PAM sequence: TTT
ggttaaattatgaaacatat

SEQ ID NO: 81774 - DNA, 20 bp, Artificial Sequence
  Description of Artificial Sequence: Synthetic oligonucleotide
  Target: SCNA; (+) strand; PAM type: YTN; PAM sequence: TTG
gttaaattatgaaacatatt

SEQ ID NO: 81775 - DNA, 20 bp, Artificial Sequence
  Description of Artificial Sequence: Synthetic oligonucleotide
  Target: SCNA; (+) strand; PAM type: YTN; PAM sequence: TTA
aattatgaaacatattctaa

SEQ ID NO: 81776 - DNA, 20 bp, Artificial Sequence
  Description of Artificial Sequence: Synthetic oligonucleotide
  Target: SCNA; (+) strand; PAM type: YTN; PAM sequence: TTA
tgaaacatattctaaatcaa

SEQ ID NO: 81777 - DNA, 20 bp, Artificial Sequence
  Description of Artificial Sequence: Synthetic oligonucleotide
  Target: SCNA; (+) strand; PAM type: YTN; PAM sequence: TTC
taaatcaaagacaatgagat

SEQ ID NO: 81778 - DNA, 20 bp, Artificial Sequence
  Description of Artificial Sequence: Synthetic oligonucleotide
  Target: SCNA; (+) strand; PAM type: YTN; PAM sequence: CTA
aatcaaagacaatgagatag

SEQ ID NO: 81779 - DNA, 20 bp, Artificial Sequence
  Description of Artificial Sequence: Synthetic oligonucleotide
  Target: SCNA; (+) strand; PAM type: YTN; PAM sequence: TTA
tgattattagaggctgacaa

SEQ ID NO: 81780 - DNA, 20 bp, Artificial Sequence
  Description of Artificial Sequence: Synthetic oligonucleotide
  Target: SCNA; (+) strand; PAM type: YTN; PAM sequence: TTA
ttagaggctgacaacggtaa

SEQ ID NO: 81781 - DNA, 20 bp, Artificial Sequence
  Description of Artificial Sequence: Synthetic oligonucleotide
  Target: SCNA; (+) strand; PAM type: YTN; PAM sequence: TTA
gaggctgacaacggtaagag

SEQ ID NO: 81782 - DNA, 20 bp, Artificial Sequence
  Description of Artificial Sequence: Synthetic oligonucleotide
  Target: SCNA; (+) strand; PAM type: YTN; PAM sequence: CTG
acaacggtaagagggagggg

SEQ ID NO: 81783 - DNA, 20 bp, Artificial Sequence
  Description of Artificial Sequence: Synthetic oligonucleotide
  Target: SCNA; (+) strand; PAM type: YTN; PAM sequence: TTG
gttaaagaatatgaaattgg

SEQ ID NO: 81784 - DNA, 20 bp, Artificial Sequence
  Description of Artificial Sequence: Synthetic oligonucleotide
  Target: SCNA; (+) strand; PAM type: YTN; PAM sequence: TTA
aagaatatgaaattggagcc

SEQ ID NO: 81785 - DNA, 20 bp, Artificial Sequence
  Description of Artificial Sequence: Synthetic oligonucleotide
  Target: SCNA; (+) strand; PAM type: YTN; PAM sequence: TTG
gagccaaatatgaggaatga

SEQ ID NO: 81786 - DNA, 20 bp, Artificial Sequence
  Description of Artificial Sequence: Synthetic oligonucleotide
  Target: SCNA; (+) strand; PAM type: YTN; PAM sequence: TTC
tagcattctgtagtactgta

SEQ ID NO: 81787 - DNA, 20 bp, Artificial Sequence
  Description of Artificial Sequence: Synthetic oligonucleotide
  Target: SCNA; (+) strand; PAM type: YTN; PAM sequence: CTA
gcattctgtagtactgtagg

SEQ ID NO: 81788 - DNA, 20 bp, Artificial Sequence
  Description of Artificial Sequence: Synthetic oligonucleotide
  Target: SCNA; (+) strand; PAM type: YTN; PAM sequence: TTC
tgtagtactgtagggtgata

SEQ ID NO: 81789 - DNA, 20 bp, Artificial Sequence
  Description of Artificial Sequence: Synthetic oligonucleotide
  Target: SCNA; (+) strand; PAM type: YTN; PAM sequence: CTG
tagtactgtagggtgatata

SEQ ID NO: 81790 - DNA, 20 bp, Artificial Sequence
  Description of Artificial Sequence: Synthetic oligonucleotide
  Target: SCNA; (+) strand; PAM type: YTN; PAM sequence: CTG
tagggtgatatacttaacaa

SEQ ID NO: 81791 - DNA, 20 bp, Artificial Sequence
  Description of Artificial Sequence: Synthetic oligonucleotide
  Target: SCNA; (+) strand; PAM type: YTN; PAM sequence: CTT
aacaatagtttattgcatat

SEQ ID NO: 81792 - DNA, 20 bp, Artificial Sequence
  Description of Artificial Sequence: Synthetic oligonucleotide
  Target: SCNA; (+) strand; PAM type: YTN; PAM sequence: TTA
acaatagtttattgcatatg

SEQ ID NO: 81793 - DNA, 20 bp, Artificial Sequence
  Description of Artificial Sequence: Synthetic oligonucleotide
  Target: SCNA; (+) strand; PAM type: YTN; PAM sequence: TTT
attgcatatgttcaaaaatc

SEQ ID NO: 81794 - DNA, 20 bp, Artificial Sequence
  Description of Artificial Sequence: Synthetic oligonucleotide
  Target: SCNA; (+) strand; PAM type: YTN; PAM sequence: TTA
ttgcatatgttcaaaaatct

SEQ ID NO: 81795 - DNA, 20 bp, Artificial Sequence
  Description of Artificial Sequence: Synthetic oligonucleotide
  Target: SCNA; (+) strand; PAM type: YTN; PAM sequence: TTG
catatgttcaaaaatctaga

SEQ ID NO: 81796 - DNA, 20 bp, Artificial Sequence
  Description of Artificial Sequence: Synthetic oligonucleotide
  Target: SCNA; (+) strand; PAM type: YTN; PAM sequence: TTC
aaaaatctagaagagagaat

SEQ ID NO: 81797 - DNA, 20 bp, Artificial Sequence
  Description of Artificial Sequence: Synthetic oligonucleotide
  Target: SCNA; (+) strand; PAM type: YTN; PAM sequence: CTA
gaagagagaatttttaattt

SEQ ID NO: 81798 - DNA, 20 bp, Artificial Sequence
  Description of Artificial Sequence: Synthetic oligonucleotide
  Target: SCNA; (+) strand; PAM type: YTN; PAM sequence: TTT
ttaatttttactgttcccac

SEQ ID NO: 81799 - DNA, 20 bp, Artificial Sequence
  Description of Artificial Sequence: Synthetic oligonucleotide
  Target: SCNA; (+) strand; PAM type: YTN; PAM sequence: TTT
taatttttactgttcccacc

SEQ ID NO: 81800 - DNA, 20 bp, Artificial Sequence
  Description of Artificial Sequence: Synthetic oligonucleotide
  Target: SCNA; (+) strand; PAM type: YTN; PAM sequence: TTT
aatttttactgttcccacca

SEQ ID NO: 81801 - DNA, 20 bp, Artificial Sequence
  Description of Artificial Sequence: Synthetic oligonucleotide
  Target: SCNA; (+) strand; PAM type: YTN; PAM sequence: TTA
atttttactgttcccaccac

SEQ ID NO: 81802 - DNA, 20 bp, Artificial Sequence
  Description of Artificial Sequence: Synthetic oligonucleotide
  Target: SCNA; (+) strand; PAM type: YTN; PAM sequence: TTT
ttactgttcccaccacaaag

SEQ ID NO: 81803 - DNA, 20 bp, Artificial Sequence
  Description of Artificial Sequence: Synthetic oligonucleotide
  Target: SCNA; (+) strand; PAM type: YTN; PAM sequence: TTT
tactgttcccaccacaaagg

SEQ ID NO: 81804 - DNA, 20 bp, Artificial Sequence
  Description of Artificial Sequence: Synthetic oligonucleotide
  Target: SCNA; (+) strand; PAM type: YTN; PAM sequence: TTT
actgttcccaccacaaagga

SEQ ID NO: 81805 - DNA, 20 bp, Artificial Sequence
  Description of Artificial Sequence: Synthetic oligonucleotide
  Target: SCNA; (+) strand; PAM type: YTN; PAM sequence: TTA
ctgttcccaccacaaaggaa

SEQ ID NO: 81806 - DNA, 20 bp, Artificial Sequence
  Description of Artificial Sequence: Synthetic oligonucleotide
  Target: SCNA; (+) strand; PAM type: YTN; PAM sequence: CTG
ttcccaccacaaaggaatga

SEQ ID NO: 81807 - DNA, 20 bp, Artificial Sequence
  Description of Artificial Sequence: Synthetic oligonucleotide
  Target: SCNA; (+) strand; PAM type: YTN; PAM sequence: TTC
ccaccacaaaggaatgataa

SEQ ID NO: 81808 - DNA, 20 bp, Artificial Sequence
  Description of Artificial Sequence: Synthetic oligonucleotide
  Target: SCNA; (+) strand; PAM type: YTN; PAM sequence: TTT
caggtaatggatatgttaat

SEQ ID NO: 81809 - DNA, 20 bp, Artificial Sequence
  Description of Artificial Sequence: Synthetic oligonucleotide
  Target: SCNA; (+) strand; PAM type: YTN; PAM sequence: TTC
aggtaatggatatgttaatt

SEQ ID NO: 81810 - DNA, 20 bp, Artificial Sequence
  Description of Artificial Sequence: Synthetic oligonucleotide
  Target: SCNA; (+) strand; PAM type: YTN; PAM sequence: TTA
attaccctaatttgattatc

SEQ ID NO: 81811 - DNA, 20 bp, Artificial Sequence
  Description of Artificial Sequence: Synthetic oligonucleotide
  Target: SCNA; (+) strand; PAM type: YTN; PAM sequence: TTA
ccctaatttgattatcacac

SEQ ID NO: 81812 - DNA, 20 bp, Artificial Sequence
  Description of Artificial Sequence: Synthetic oligonucleotide
  Target: SCNA; (+) strand; PAM type: YTN; PAM sequence: CTA
atttgattatcacacattgt

SEQ ID NO: 81813 - DNA, 20 bp, Artificial Sequence
  Description of Artificial Sequence: Synthetic oligonucleotide
  Target: SCNA; (+) strand; PAM type: YTN; PAM sequence: TTT
gattatcacacattgtatac

SEQ ID NO: 81814 - DNA, 20 bp, Artificial Sequence
  Description of Artificial Sequence: Synthetic oligonucleotide
  Target: SCNA; (+) strand; PAM type: YTN; PAM sequence: TTG
attatcacacattgtataca

SEQ ID NO: 81815 - DNA, 20 bp, Artificial Sequence
  Description of Artificial Sequence: Synthetic oligonucleotide
  Target: SCNA; (+) strand; PAM type: YTN; PAM sequence: TTA
tcacacattgtatacatgta

SEQ ID NO: 81816 - DNA, 20 bp, Artificial Sequence
  Description of Artificial Sequence: Synthetic oligonucleotide
  Target: SCNA; (+) strand; PAM type: YTN; PAM sequence: TTG
tatacatgtatggaaatata

SEQ ID NO: 81817 - DNA, 20 bp, Artificial Sequence
  Description of Artificial Sequence: Synthetic oligonucleotide
  Target: SCNA; (+) strand; PAM type: YTN; PAM sequence: TTC
tggatcccacaattatatac

SEQ ID NO: 81818 - DNA, 20 bp, Artificial Sequence
  Description of Artificial Sequence: Synthetic oligonucleotide
  Target: SCNA; (+) strand; PAM type: YTN; PAM sequence: CTG
gatcccacaattatatacaa

SEQ ID NO: 81819 - DNA, 20 bp, Artificial Sequence
  Description of Artificial Sequence: Synthetic oligonucleotide
  Target: SCNA; (+) strand; PAM type: YTN; PAM sequence: TTA
tatacaattattacatattc

SEQ ID NO: 81820 - DNA, 20 bp, Artificial Sequence
  Description of Artificial Sequence: Synthetic oligonucleotide
  Target: SCNA; (+) strand; PAM type: YTN; PAM sequence: TTA
ttacatattcactaaaaata

SEQ ID NO: 81821 - DNA, 20 bp, Artificial Sequence
  Description of Artificial Sequence: Synthetic oligonucleotide
  Target: SCNA; (+) strand; PAM type: YTN; PAM sequence: TTA
catattcactaaaaataaaa

SEQ ID NO: 81822 - DNA, 20 bp, Artificial Sequence
  Description of Artificial Sequence: Synthetic oligonucleotide
  Target: SCNA; (+) strand; PAM type: YTN; PAM sequence: TTC
actaaaaataaaagaaaaat

SEQ ID NO: 81823 - DNA, 20 bp, Artificial Sequence
  Description of Artificial Sequence: Synthetic oligonucleotide
  Target: SCNA; (+) strand; PAM type: YTN; PAM sequence: CTA
aaaataaaagaaaaattaaa

SEQ ID NO: 81824 - DNA, 20 bp, Artificial Sequence
  Description of Artificial Sequence: Synthetic oligonucleotide
  Target: SCNA; (+) strand; PAM type: YTN; PAM sequence: TTA
aaaatagagtagcatatgac

SEQ ID NO: 81825 - DNA, 20 bp, Artificial Sequence
  Description of Artificial Sequence: Synthetic oligonucleotide
  Target: SCNA; (+) strand; PAM type: YTN; PAM sequence: CTC
ttctgggtgtagatccacaa

SEQ ID NO: 81826 - DNA, 20 bp, Artificial Sequence
  Description of Artificial Sequence: Synthetic oligonucleotide
  Target: SCNA; (+) strand; PAM type: YTN; PAM sequence: CTT
ctgggtgtagatccacaaga

SEQ ID NO: 81827 - DNA, 20 bp, Artificial Sequence
  Description of Artificial Sequence: Synthetic oligonucleotide
  Target: SCNA; (+) strand; PAM type: YTN; PAM sequence: TTC
tgggtgtagatccacaagaa

SEQ ID NO: 81828 - DNA, 20 bp, Artificial Sequence
  Description of Artificial Sequence: Synthetic oligonucleotide
  Target: SCNA; (+) strand; PAM type: YTN; PAM sequence: CTG
ggtgtagatccacaagaaaa

SEQ ID NO: 81829 - DNA, 20 bp, Artificial Sequence
  Description of Artificial Sequence: Synthetic oligonucleotide
  Target: SCNA; (+) strand; PAM type: YTN; PAM sequence: TTT
cagcatatctgtttccaagg

SEQ ID NO: 81830 - DNA, 20 bp, Artificial Sequence
  Description of Artificial Sequence: Synthetic oligonucleotide
  Target: SCNA; (+) strand; PAM type: YTN; PAM sequence: TTC
agcatatctgtttccaaggg

SEQ ID NO: 81831 - DNA, 20 bp, Artificial Sequence
  Description of Artificial Sequence: Synthetic oligonucleotide
  Target: SCNA; (+) strand; PAM type: YTN; PAM sequence: CTG
tttccaagggccccaacaca

SEQ ID NO: 81832 - DNA, 20 bp, Artificial Sequence
  Description of Artificial Sequence: Synthetic oligonucleotide
  Target: SCNA; (+) strand; PAM type: YTN; PAM sequence: TTT
ccaagggccccaacacagtg

SEQ ID NO: 81833 - DNA, 20 bp, Artificial Sequence
  Description of Artificial Sequence: Synthetic oligonucleotide
  Target: SCNA; (+) strand; PAM type: YTN; PAM sequence: TTC
caagggccccaacacagtgg

SEQ ID NO: 81834 - DNA, 20 bp, Artificial Sequence
  Description of Artificial Sequence: Synthetic oligonucleotide
  Target: SCNA; (+) strand; PAM type: YTN; PAM sequence: CTC
ttgcttggaatcccagtgct

SEQ ID NO: 81835 - DNA, 20 bp, Artificial Sequence
  Description of Artificial Sequence: Synthetic oligonucleotide
  Target: SCNA; (+) strand; PAM type: YTN; PAM sequence: CTT
gcttggaatcccagtgcttt

SEQ ID NO: 81836 - DNA, 20 bp, Artificial Sequence
  Description of Artificial Sequence: Synthetic oligonucleotide
  Target: SCNA; (+) strand; PAM type: YTN; PAM sequence: TTG
cttggaatcccagtgctttg

SEQ ID NO: 81837 - DNA, 20 bp, Artificial Sequence
  Description of Artificial Sequence: Synthetic oligonucleotide
  Target: SCNA; (+) strand; PAM type: YTN; PAM sequence: CTT
ggaatcccagtgctttggga

SEQ ID NO: 81838 - DNA, 20 bp, Artificial Sequence
  Description of Artificial Sequence: Synthetic oligonucleotide
  Target: SCNA; (+) strand; PAM type: YTN; PAM sequence: TTG
gaatcccagtgctttgggag

SEQ ID NO: 81839 - DNA, 20 bp, Artificial Sequence
  Description of Artificial Sequence: Synthetic oligonucleotide
  Target: SCNA; (+) strand; PAM type: YTN; PAM sequence: CTT
tgggaggctgaggcaggaag

SEQ ID NO: 81840 - DNA, 20 bp, Artificial Sequence
  Description of Artificial Sequence: Synthetic oligonucleotide
  Target: SCNA; (+) strand; PAM type: YTN; PAM sequence: TTT
gggaggctgaggcaggaaga

SEQ ID NO: 81841 - DNA, 20 bp, Artificial Sequence
  Description of Artificial Sequence: Synthetic oligonucleotide
  Target: SCNA; (+) strand; PAM type: YTN; PAM sequence: TTG
ggaggctgaggcaggaagat

SEQ ID NO: 81842 - DNA, 20 bp, Artificial Sequence
  Description of Artificial Sequence: Synthetic oligonucleotide
  Target: SCNA; (+) strand; PAM type: YTN; PAM sequence: CTG
aggcaggaagatcacttata

SEQ ID NO: 81843 - DNA, 20 bp, Artificial Sequence
  Description of Artificial Sequence: Synthetic oligonucleotide
  Target: SCNA; (+) strand; PAM type: YTN; PAM sequence: CTT
ataactatataaggaatttt

SEQ ID NO: 81844 - DNA, 20 bp, Artificial Sequence
  Description of Artificial Sequence: Synthetic oligonucleotide
  Target: SCNA; (+) strand; PAM type: YTN; PAM sequence: TTA
taactatataaggaatttta

SEQ ID NO: 81845 - DNA, 20 bp, Artificial Sequence
  Description of Artificial Sequence: Synthetic oligonucleotide
  Target: SCNA; (+) strand; PAM type: YTN; PAM sequence: CTA
tataaggaattttaaaaaca

SEQ ID NO: 81846 - DNA, 20 bp, Artificial Sequence
  Description of Artificial Sequence: Synthetic oligonucleotide
  Target: SCNA; (+) strand; PAM type: YTN; PAM sequence: TTT
taaaaacactaaaactaata

SEQ ID NO: 81847 - DNA, 20 bp, Artificial Sequence
  Description of Artificial Sequence: Synthetic oligonucleotide
  Target: SCNA; (+) strand; PAM type: YTN; PAM sequence: TTT
aaaaacactaaaactaatat

SEQ ID NO: 81848 - DNA, 20 bp, Artificial Sequence
  Description of Artificial Sequence: Synthetic oligonucleotide
  Target: SCNA; (+) strand; PAM type: YTN; PAM sequence: TTA
aaaacactaaaactaatatt

SEQ ID NO: 81849 - DNA, 20 bp, Artificial Sequence
  Description of Artificial Sequence: Synthetic oligonucleotide
  Target: SCNA; (+) strand; PAM type: YTN; PAM sequence: CTA
aaactaatatttatttattt

SEQ ID NO: 81850 - DNA, 20 bp, Artificial Sequence
  Description of Artificial Sequence: Synthetic oligonucleotide
  Target: SCNA; (+) strand; PAM type: YTN; PAM sequence: CTA
atatttatttatttagcaaa

SEQ ID NO: 81851 - DNA, 20 bp, Artificial Sequence
  Description of Artificial Sequence: Synthetic oligonucleotide
  Target: SCNA; (+) strand; PAM type: YTN; PAM sequence: TTT
atttatttagcaaaccagaa

SEQ ID NO: 81852 - DNA, 20 bp, Artificial Sequence
  Description of Artificial Sequence: Synthetic oligonucleotide
  Target: SCNA; (+) strand; PAM type: YTN; PAM sequence: TTA
tttatttagcaaaccagaat

SEQ ID NO: 81853 - DNA, 20 bp, Artificial Sequence
  Description of Artificial Sequence: Synthetic oligonucleotide
  Target: SCNA; (+) strand; PAM type: YTN; PAM sequence: TTT
atttagcaaaccagaattta

SEQ ID NO: 81854 - DNA, 20 bp, Artificial Sequence
  Description of Artificial Sequence: Synthetic oligonucleotide
  Target: SCNA; (+) strand; PAM type: YTN; PAM sequence: TTA
tttagcaaaccagaatttaa

SEQ ID NO: 81855 - DNA, 20 bp, Artificial Sequence
  Description of Artificial Sequence: Synthetic oligonucleotide
  Target: SCNA; (+) strand; PAM type: YTN; PAM sequence: TTT
agcaaaccagaatttaaaac

SEQ ID NO: 81856 - DNA, 20 bp, Artificial Sequence
  Description of Artificial Sequence: Synthetic oligonucleotide
  Target: SCNA; (+) strand; PAM type: YTN; PAM sequence: TTA
gcaaaccagaatttaaaaca

SEQ ID NO: 81857 - DNA, 20 bp, Artificial Sequence
  Description of Artificial Sequence: Synthetic oligonucleotide
  Target: SCNA; (+) strand; PAM type: YTN; PAM sequence: TTT
aaaacattagaaattaaagt

SEQ ID NO: 81858 - DNA, 20 bp, Artificial Sequence
  Description of Artificial Sequence: Synthetic oligonucleotide
  Target: SCNA; (+) strand; PAM type: YTN; PAM sequence: TTA
aaacattagaaattaaagtg

SEQ ID NO: 81859 - DNA, 20 bp, Artificial Sequence
  Description of Artificial Sequence: Synthetic oligonucleotide
  Target: SCNA; (+) strand; PAM type: YTN; PAM sequence: TTA
gaaattaaagtgttttattt

SEQ ID NO: 81860 - DNA, 20 bp, Artificial Sequence
  Description of Artificial Sequence: Synthetic oligonucleotide
  Target: SCNA; (+) strand; PAM type: YTN; PAM sequence: TTA
aagtgttttatttctttgta

SEQ ID NO: 81861 - DNA, 20 bp, Artificial Sequence
  Description of Artificial Sequence: Synthetic oligonucleotide
  Target: SCNA; (+) strand; PAM type: YTN; PAM sequence: TTT
tatttctttgtaaaaaactt

SEQ ID NO: 81862 - DNA, 20 bp, Artificial Sequence
  Description of Artificial Sequence: Synthetic oligonucleotide
  Target: SCNA; (+) strand; PAM type: YTN; PAM sequence: TTT
atttctttgtaaaaaactta

SEQ ID NO: 81863 - DNA, 20 bp, Artificial Sequence
  Description of Artificial Sequence: Synthetic oligonucleotide
  Target: SCNA; (+) strand; PAM type: YTN; PAM sequence: TTA
tttctttgtaaaaaacttat

SEQ ID NO: 81864 - DNA, 20 bp, Artificial Sequence
  Description of Artificial Sequence: Synthetic oligonucleotide
  Target: SCNA; (+) strand; PAM type: YTN; PAM sequence: TTT
ctttgtaaaaaacttatcaa

SEQ ID NO: 81865 - DNA, 20 bp, Artificial Sequence
  Description of Artificial Sequence: Synthetic oligonucleotide
  Target: SCNA; (+) strand; PAM type: YTN; PAM sequence: TTC
tttgtaaaaaacttatcaag

SEQ ID NO: 81866 - DNA, 20 bp, Artificial Sequence
  Description of Artificial Sequence: Synthetic oligonucleotide
  Target: SCNA; (+) strand; PAM type: YTN; PAM sequence: CTT
tgtaaaaaacttatcaagag

SEQ ID NO: 81867 - DNA, 20 bp, Artificial Sequence
  Description of Artificial Sequence: Synthetic oligonucleotide
  Target: SCNA; (+) strand; PAM type: YTN; PAM sequence: TTT
gtaaaaaacttatcaagagt

SEQ ID NO: 81868 - DNA, 20 bp, Artificial Sequence
  Description of Artificial Sequence: Synthetic oligonucleotide
  Target: SCNA; (+) strand; PAM type: YTN; PAM sequence: TTG
taaaaaacttatcaagagta

SEQ ID NO: 81869 - DNA, 20 bp, Artificial Sequence
  Description of Artificial Sequence: Synthetic oligonucleotide
  Target: SCNA; (+) strand; PAM type: YTN; PAM sequence: CTT
atcaagagtaatgtaaatag

SEQ ID NO: 81870 - DNA, 20 bp, Artificial Sequence
  Description of Artificial Sequence: Synthetic oligonucleotide
  Target: SCNA; (+) strand; PAM type: YTN; PAM sequence: TTA
tcaagagtaatgtaaatagt

SEQ ID NO: 81871 - DNA, 20 bp, Artificial Sequence
  Description of Artificial Sequence: Synthetic oligonucleotide
  Target: SCNA; (+) strand; PAM type: YTN; PAM sequence: TTT
gtcttcttctcattgtataa

SEQ ID NO: 81872 - DNA, 20 bp, Artificial Sequence
  Description of Artificial Sequence: Synthetic oligonucleotide
  Target: SCNA; (+) strand; PAM type: YTN; PAM sequence: TTG
tcttcttctcattgtataac

SEQ ID NO: 81873 - DNA, 20 bp, Artificial Sequence
  Description of Artificial Sequence: Synthetic oligonucleotide
  Target: SCNA; (+) strand; PAM type: YTN; PAM sequence: CTT
cttctcattgtataacttcc

SEQ ID NO: 81874 - DNA, 20 bp, Artificial Sequence
  Description of Artificial Sequence: Synthetic oligonucleotide
  Target: SCNA; (+) strand; PAM type: YTN; PAM sequence: TTC
ttctcattgtataacttcct

SEQ ID NO: 81875 - DNA, 20 bp, Artificial Sequence
  Description of Artificial Sequence: Synthetic oligonucleotide
  Target: SCNA; (+) strand; PAM type: YTN; PAM sequence: CTT
ctcattgtataacttcctat

SEQ ID NO: 81876 - DNA, 20 bp, Artificial Sequence
  Description of Artificial Sequence: Synthetic oligonucleotide
  Target: SCNA; (+) strand; PAM type: YTN; PAM sequence: TTC
tcattgtataacttcctata

SEQ ID NO: 81877 - DNA, 20 bp, Artificial Sequence
  Description of Artificial Sequence: Synthetic oligonucleotide
  Target: SCNA; (+) strand; PAM type: YTN; PAM sequence: CTC
attgtataacttcctatacg

SEQ ID NO: 81878 - DNA, 20 bp, Artificial Sequence
  Description of Artificial Sequence: Synthetic oligonucleotide
  Target: SCNA; (+) strand; PAM type: YTN; PAM sequence: TTG
tataacttcctatacggagt

SEQ ID NO: 81879 - DNA, 20 bp, Artificial Sequence
  Description of Artificial Sequence: Synthetic oligonucleotide
  Target: SCNA; (+) strand; PAM type: YTN; PAM sequence: CTT
cctatacggagtggacatgt

SEQ ID NO: 81880 - DNA, 20 bp, Artificial Sequence
  Description of Artificial Sequence: Synthetic oligonucleotide
  Target: SCNA; (+) strand; PAM type: YTN; PAM sequence: TTC
ctatacggagtggacatgtt

SEQ ID NO: 81881 - DNA, 20 bp, Artificial Sequence
  Description of Artificial Sequence: Synthetic oligonucleotide
  Target: SCNA; (+) strand; PAM type: YTN; PAM sequence: CTA
tacggagtggacatgttttt

SEQ ID NO: 81882 - DNA, 20 bp, Artificial Sequence
  Description of Artificial Sequence: Synthetic oligonucleotide
  Target: SCNA; (+) strand; PAM type: YTN; PAM sequence: TTT
tttatattttacagaattgt

SEQ ID NO: 81883 - DNA, 20 bp, Artificial Sequence
  Description of Artificial Sequence: Synthetic oligonucleotide
  Target: SCNA; (+) strand; PAM type: YTN; PAM sequence: TTT
ttatattttacagaattgtc

SEQ ID NO: 81884 - DNA, 20 bp, Artificial Sequence
  Description of Artificial Sequence: Synthetic oligonucleotide
  Target: SCNA; (+) strand; PAM type: YTN; PAM sequence: TTT
tatattttacagaattgtca

SEQ ID NO: 81885 - DNA, 20 bp, Artificial Sequence
  Description of Artificial Sequence: Synthetic oligonucleotide
  Target: SCNA; (+) strand; PAM type: YTN; PAM sequence: TTT
atattttacagaattgtcat

SEQ ID NO: 81886 - DNA, 20 bp, Artificial Sequence
  Description of Artificial Sequence: Synthetic oligonucleotide
  Target: SCNA; (+) strand; PAM type: YTN; PAM sequence: TTA
tattttacagaattgtcata

SEQ ID NO: 81887 - DNA, 20 bp, Artificial Sequence
  Description of Artificial Sequence: Synthetic oligonucleotide
  Target: SCNA; (+) strand; PAM type: YTN; PAM sequence: TTT
tacagaattgtcatactcta

SEQ ID NO: 81888 - DNA, 20 bp, Artificial Sequence
  Description of Artificial Sequence: Synthetic oligonucleotide
  Target: SCNA; (+) strand; PAM type: YTN; PAM sequence: TTT
acagaattgtcatactctat

SEQ ID NO: 81889 - DNA, 20 bp, Artificial Sequence
  Description of Artificial Sequence: Synthetic oligonucleotide
  Target: SCNA; (+) strand; PAM type: YTN; PAM sequence: TTA
cagaattgtcatactctatt

SEQ ID NO: 81890 - DNA, 20 bp, Artificial Sequence
  Description of Artificial Sequence: Synthetic oligonucleotide
  Target: SCNA; (+) strand; PAM type: YTN; PAM sequence: TTG
tcatactctattctaaattt

SEQ ID NO: 81891 - DNA, 20 bp, Artificial Sequence
  Description of Artificial Sequence: Synthetic oligonucleotide
  Target: SCNA; (+) strand; PAM type: YTN; PAM sequence: CTC
tattctaaatttgaattagg

SEQ ID NO: 81892 - DNA, 20 bp, Artificial Sequence
  Description of Artificial Sequence: Synthetic oligonucleotide
  Target: SCNA; (+) strand; PAM type: YTN; PAM sequence: CTA
ttctaaatttgaattaggag

SEQ ID NO: 81893 - DNA, 20 bp, Artificial Sequence
  Description of Artificial Sequence: Synthetic oligonucleotide
  Target: SCNA; (+) strand; PAM type: YTN; PAM sequence: TTC
taaatttgaattaggagttt

SEQ ID NO: 81894 - DNA, 20 bp, Artificial Sequence
  Description of Artificial Sequence: Synthetic oligonucleotide
  Target: SCNA; (+) strand; PAM type: YTN; PAM sequence: CTA
aatttgaattaggagtttga

SEQ ID NO: 81895 - DNA, 20 bp, Artificial Sequence
  Description of Artificial Sequence: Synthetic oligonucleotide
  Target: SCNA; (+) strand; PAM type: YTN; PAM sequence: TTT
gaattaggagtttgagacca

SEQ ID NO: 81896 - DNA, 20 bp, Artificial Sequence
  Description of Artificial Sequence: Synthetic oligonucleotide
  Target: SCNA; (+) strand; PAM type: YTN; PAM sequence: TTG
aattaggagtttgagaccag

SEQ ID NO: 81897 - DNA, 20 bp, Artificial Sequence
  Description of Artificial Sequence: Synthetic oligonucleotide
  Target: SCNA; (+) strand; PAM type: YTN; PAM sequence: TTA
ggagtttgagaccagtctgg

SEQ ID NO: 81898 - DNA, 20 bp, Artificial Sequence
  Description of Artificial Sequence: Synthetic oligonucleotide
  Target: SCNA; (+) strand; PAM type: YTN; PAM sequence: TTT
gagaccagtctgggcaacag

SEQ ID NO: 81899 - DNA, 20 bp, Artificial Sequence
  Description of Artificial Sequence: Synthetic oligonucleotide
  Target: SCNA; (+) strand; PAM type: YTN; PAM sequence: TTG
agaccagtctgggcaacaga

SEQ ID NO: 81900 - DNA, 20 bp, Artificial Sequence
  Description of Artificial Sequence: Synthetic oligonucleotide
  Target: SCNA; (+) strand; PAM type: YTN; PAM sequence: CTG
ggcaacagagtgagatgcta

SEQ ID NO: 81901 - DNA, 20 bp, Artificial Sequence
  Description of Artificial Sequence: Synthetic oligonucleotide
  Target: SCNA; (+) strand; PAM type: YTN; PAM sequence: CTA
tatctacaaaaaatattaaa

SEQ ID NO: 81902 - DNA, 20 bp, Artificial Sequence
  Description of Artificial Sequence: Synthetic oligonucleotide
  Target: SCNA; (+) strand; PAM type: YTN; PAM sequence: CTA
caaaaaatattaaaaattag

SEQ ID NO: 81903 - DNA, 20 bp, Artificial Sequence
  Description of Artificial Sequence: Synthetic oligonucleotide
  Target: SCNA; (+) strand; PAM type: YTN; PAM sequence: TTA
aaaattagccaggcatggta

SEQ ID NO: 81904 - DNA, 20 bp, Artificial Sequence
  Description of Artificial Sequence: Synthetic oligonucleotide
  Target: SCNA; (+) strand; PAM type: YTN; PAM sequence: TTA
gccaggcatggtaatgtatg

SEQ ID NO: 81905 - DNA, 20 bp, Artificial Sequence
  Description of Artificial Sequence: Synthetic oligonucleotide
  Target: SCNA; (+) strand; PAM type: YTN; PAM sequence: CTG
tagtctcagctacttgggag

SEQ ID NO: 81906 - DNA, 20 bp, Artificial Sequence
  Description of Artificial Sequence: Synthetic oligonucleotide
  Target: SCNA; (+) strand; PAM type: YTN; PAM sequence: CTC
agctacttgggaggccaagg

SEQ ID NO: 81907 - DNA, 20 bp, Artificial Sequence
  Description of Artificial Sequence: Synthetic oligonucleotide
  Target: SCNA; (+) strand; PAM type: YTN; PAM sequence: CTA
cttgggaggccaaggcagga

SEQ ID NO: 81908 - DNA, 20 bp, Artificial Sequence
  Description of Artificial Sequence: Synthetic oligonucleotide
  Target: SCNA; (+) strand; PAM type: YTN; PAM sequence: CTT
gggaggccaaggcaggagga

SEQ ID NO: 81909 - DNA, 20 bp, Artificial Sequence
  Description of Artificial Sequence: Synthetic oligonucleotide
  Target: SCNA; (+) strand; PAM type: YTN; PAM sequence: TTG
ggaggccaaggcaggaggat

SEQ ID NO: 81910 - DNA, 20 bp, Artificial Sequence
  Description of Artificial Sequence: Synthetic oligonucleotide
  Target: SCNA; (+) strand; PAM type: YTN; PAM sequence: CTC
ttgagcccagaagtttgagg

SEQ ID NO: 81911 - DNA, 20 bp, Artificial Sequence
  Description of Artificial Sequence: Synthetic oligonucleotide
  Target: SCNA; (+) strand; PAM type: YTN; PAM sequence: CTT
gagcccagaagtttgaggtt

SEQ ID NO: 81912 - DNA, 20 bp, Artificial Sequence
  Description of Artificial Sequence: Synthetic oligonucleotide
  Target: SCNA; (+) strand; PAM type: YTN; PAM sequence: TTG
agcccagaagtttgaggtta

SEQ ID NO: 81913 - DNA, 20 bp, Artificial Sequence
  Description of Artificial Sequence: Synthetic oligonucleotide
  Target: SCNA; (+) strand; PAM type: YTN; PAM sequence: TTT
gaggttacagtgagctatga

SEQ ID NO: 81914 - DNA, 20 bp, Artificial Sequence
  Description of Artificial Sequence: Synthetic oligonucleotide
  Target: SCNA; (+) strand; PAM type: YTN; PAM sequence: TTG
aggttacagtgagctatgat

SEQ ID NO: 81915 - DNA, 20 bp, Artificial Sequence
  Description of Artificial Sequence: Synthetic oligonucleotide
  Target: SCNA; (+) strand; PAM type: YTN; PAM sequence: TTA
cagtgagctatgataacacc

SEQ ID NO: 81916 - DNA, 20 bp, Artificial Sequence
  Description of Artificial Sequence: Synthetic oligonucleotide
  Target: SCNA; (+) strand; PAM type: YTN; PAM sequence: CTA
tgataacaccactccattgc

SEQ ID NO: 81917 - DNA, 20 bp, Artificial Sequence
  Description of Artificial Sequence: Synthetic oligonucleotide
  Target: SCNA; (+) strand; PAM type: YTN; PAM sequence: CTC
cattgcagcctgggtgacag

SEQ ID NO: 81918 - DNA, 20 bp, Artificial Sequence
  Description of Artificial Sequence: Synthetic oligonucleotide
  Target: SCNA; (+) strand; PAM type: YTN; PAM sequence: TTG
cagcctgggtgacagcaaga

SEQ ID NO: 81919 - DNA, 20 bp, Artificial Sequence
  Description of Artificial Sequence: Synthetic oligonucleotide
  Target: SCNA; (+) strand; PAM type: YTN; PAM sequence: CTG
ggtgacagcaagaccctgtc

SEQ ID NO: 81920 - DNA, 20 bp, Artificial Sequence
  Description of Artificial Sequence: Synthetic oligonucleotide
  Target: SCNA; (+) strand; PAM type: YTN; PAM sequence: CTG
tctccaaaaaagaaaaaaag

SEQ ID NO: 81921 - DNA, 20 bp, Artificial Sequence
  Description of Artificial Sequence: Synthetic oligonucleotide
  Target: SCNA; (+) strand; PAM type: YTN; PAM sequence: CTC
caaaaaagaaaaaaagaaaa

SEQ ID NO: 81922 - DNA, 20 bp, Artificial Sequence
  Description of Artificial Sequence: Synthetic oligonucleotide
  Target: SCNA; (+) strand; PAM type: YTN; PAM sequence: CTA
aagtgtctactgatagatag

SEQ ID NO: 81923 - DNA, 20 bp, Artificial Sequence
  Description of Artificial Sequence: Synthetic oligonucleotide
  Target: SCNA; (+) strand; PAM type: YTN; PAM sequence: CTA
ctgatagataggtagataaa

SEQ ID NO: 81924 - DNA, 20 bp, Artificial Sequence
  Description of Artificial Sequence: Synthetic oligonucleotide
  Target: SCNA; (+) strand; PAM type: YTN; PAM sequence: CTG
atagataggtagataaaaag

SEQ ID NO: 81925 - DNA, 20 bp, Artificial Sequence
  Description of Artificial Sequence: Synthetic oligonucleotide
  Target: SCNA; (+) strand; PAM type: YTN; PAM sequence: TTG
tggtacatagatacaatgga

SEQ ID NO: 81926 - DNA, 20 bp, Artificial Sequence
  Description of Artificial Sequence: Synthetic oligonucleotide
  Target: SCNA; (+) strand; PAM type: YTN; PAM sequence: CTA
aaaaaacaagatcctaccat

SEQ ID NO: 81927 - DNA, 20 bp, Artificial Sequence
  Description of Artificial Sequence: Synthetic oligonucleotide
  Target: SCNA; (+) strand; PAM type: YTN; PAM sequence: CTA
ccatttacaacatggatgaa

SEQ ID NO: 81928 - DNA, 20 bp, Artificial Sequence
  Description of Artificial Sequence: Synthetic oligonucleotide
  Target: SCNA; (+) strand; PAM type: YTN; PAM sequence: TTT
acaacatggatgaacccaga

SEQ ID NO: 81929 - DNA, 20 bp, Artificial Sequence
  Description of Artificial Sequence: Synthetic oligonucleotide
  Target: SCNA; (+) strand; PAM type: YTN; PAM sequence: TTA
caacatggatgaacccagac

SEQ ID NO: 81930 - DNA, 20 bp, Artificial Sequence
  Description of Artificial Sequence: Synthetic oligonucleotide
  Target: SCNA; (+) strand; PAM type: YTN; PAM sequence: TTA
tgctaagtgaaataagccaa

SEQ ID NO: 81931 - DNA, 20 bp, Artificial Sequence
  Description of Artificial Sequence: Synthetic oligonucleotide
  Target: SCNA; (+) strand; PAM type: YTN; PAM sequence: CTA
agtgaaataagccaaacaca

SEQ ID NO: 81932 - DNA, 20 bp, Artificial Sequence
  Description of Artificial Sequence: Synthetic oligonucleotide
  Target: SCNA; (+) strand; PAM type: YTN; PAM sequence: TTA
cattatctcacatatatgtg

SEQ ID NO: 81933 - DNA, 20 bp, Artificial Sequence
  Description of Artificial Sequence: Synthetic oligonucleotide
  Target: SCNA; (+) strand; PAM type: YTN; PAM sequence: TTA
tctcacatatatgtggaagc

SEQ ID NO: 81934 - DNA, 20 bp, Artificial Sequence
  Description of Artificial Sequence: Synthetic oligonucleotide
  Target: SCNA; (+) strand; PAM type: YTN; PAM sequence: CTC
acatatatgtggaagcttga

SEQ ID NO: 81935 - DNA, 20 bp, Artificial Sequence
  Description of Artificial Sequence: Synthetic oligonucleotide
  Target: SCNA; (+) strand; PAM type: YTN; PAM sequence: CTT
gaaacaaaattcaaatatac

SEQ ID NO: 81936 - DNA, 20 bp, Artificial Sequence
  Description of Artificial Sequence: Synthetic oligonucleotide
  Target: SCNA; (+) strand; PAM type: YTN; PAM sequence: TTG
aaacaaaattcaaatataca

SEQ ID NO: 81937 - DNA, 20 bp, Artificial Sequence
  Description of Artificial Sequence: Synthetic oligonucleotide
  Target: SCNA; (+) strand; PAM type: YTN; PAM sequence: TTC
aaatatacagagactacgta

SEQ ID NO: 81938 - DNA, 20 bp, Artificial Sequence
  Description of Artificial Sequence: Synthetic oligonucleotide
  Target: SCNA; (+) strand; PAM type: YTN; PAM sequence: CTA
cgtaaaaaacagggttaata

SEQ ID NO: 81939 - DNA, 20 bp, Artificial Sequence
  Description of Artificial Sequence: Synthetic oligonucleotide
  Target: SCNA; (+) strand; PAM type: YTN; PAM sequence: TTA
ataggggtggaaaagtaggt

SEQ ID NO: 81940 - DNA, 20 bp, Artificial Sequence
  Description of Artificial Sequence: Synthetic oligonucleotide
  Target: SCNA; (+) strand; PAM type: YTN; PAM sequence: CTA
atgtatgaggactgtaggtg

SEQ ID NO: 81941 - DNA, 20 bp, Artificial Sequence
  Description of Artificial Sequence: Synthetic oligonucleotide
  Target: SCNA; (+) strand; PAM type: YTN; PAM sequence: CTG
taggtgataaaattgtacta

SEQ ID NO: 81942 - DNA, 20 bp, Artificial Sequence
  Description of Artificial Sequence: Synthetic oligonucleotide
  Target: SCNA; (+) strand; PAM type: YTN; PAM sequence: TTG
tactatatttgagattcatg

SEQ ID NO: 81943 - DNA, 20 bp, Artificial Sequence
  Description of Artificial Sequence: Synthetic oligonucleotide
  Target: SCNA; (+) strand; PAM type: YTN; PAM sequence: CTA
tatttgagattcatgataaa

SEQ ID NO: 81944 - DNA, 20 bp, Artificial Sequence
  Description of Artificial Sequence: Synthetic oligonucleotide
  Target: SCNA; (+) strand; PAM type: YTN; PAM sequence: TTT
gagattcatgataaataagt

SEQ ID NO: 81945 - DNA, 20 bp, Artificial Sequence
  Description of Artificial Sequence: Synthetic oligonucleotide
  Target: SCNA; (+) strand; PAM type: YTN; PAM sequence: TTG
agattcatgataaataagtg

SEQ ID NO: 81946 - DNA, 20 bp, Artificial Sequence
  Description of Artificial Sequence: Synthetic oligonucleotide
  Target: SCNA; (+) strand; PAM type: YTN; PAM sequence: TTC
atgataaataagtggatttt

SEQ ID NO: 81947 - DNA, 20 bp, Artificial Sequence
  Description of Artificial Sequence: Synthetic oligonucleotide
  Target: SCNA; (+) strand; PAM type: YTN; PAM sequence: TTT
tagctgcccttgccacaaaa

SEQ ID NO: 81948 - DNA, 20 bp, Artificial Sequence
  Description of Artificial Sequence: Synthetic oligonucleotide
  Target: SCNA; (+) strand; PAM type: YTN; PAM sequence: TTT
agctgcccttgccacaaaaa

SEQ ID NO: 81949 - DNA, 20 bp, Artificial Sequence
  Description of Artificial Sequence: Synthetic oligonucleotide
  Target: SCNA; (+) strand; PAM type: YTN; PAM sequence: TTA
gctgcccttgccacaaaaac

SEQ ID NO: 81950 - DNA, 20 bp, Artificial Sequence
  Description of Artificial Sequence: Synthetic oligonucleotide
  Target: SCNA; (+) strand; PAM type: YTN; PAM sequence: CTG
cccttgccacaaaaacaaca

SEQ ID NO: 81951 - DNA, 20 bp, Artificial Sequence
  Description of Artificial Sequence: Synthetic oligonucleotide
  Target: SCNA; (+) strand; PAM type: YTN; PAM sequence: CTT
gccacaaaaacaacaaaaaa

SEQ ID NO: 81952 - DNA, 20 bp, Artificial Sequence
  Description of Artificial Sequence: Synthetic oligonucleotide
  Target: SCNA; (+) strand; PAM type: YTN; PAM sequence: TTG
ccacaaaaacaacaaaaaag

SEQ ID NO: 81953 - DNA, 20 bp, Artificial Sequence
  Description of Artificial Sequence: Synthetic oligonucleotide
  Target: SCNA; (+) strand; PAM type: YTN; PAM sequence: CTA
tgagagattatgaatatatt

SEQ ID NO: 81954 - DNA, 20 bp, Artificial Sequence
  Description of Artificial Sequence: Synthetic oligonucleotide
  Target: SCNA; (+) strand; PAM type: YTN; PAM sequence: TTA
tgaatatattaatttgcttc

SEQ ID NO: 81955 - DNA, 20 bp, Artificial Sequence
  Description of Artificial Sequence: Synthetic oligonucleotide
  Target: SCNA; (+) strand; PAM type: YTN; PAM sequence: TTA
atttgcttcaatatagtaat

SEQ ID NO: 81956 - DNA, 20 bp, Artificial Sequence
  Description of Artificial Sequence: Synthetic oligonucleotide
  Target: SCNA; (+) strand; PAM type: YTN; PAM sequence: TTT
gcttcaatatagtaattttt

SEQ ID NO: 81957 - DNA, 20 bp, Artificial Sequence
  Description of Artificial Sequence: Synthetic oligonucleotide
  Target: SCNA; (+) strand; PAM type: YTN; PAM sequence: TTG
cttcaatatagtaatttttt

SEQ ID NO: 81958 - DNA, 20 bp, Artificial Sequence
  Description of Artificial Sequence: Synthetic oligonucleotide
  Target: SCNA; (+) strand; PAM type: YTN; PAM sequence: CTT
caatatagtaattttttagt

SEQ ID NO: 81959 - DNA, 20 bp, Artificial Sequence
  Description of Artificial Sequence: Synthetic oligonucleotide
  Target: SCNA; (+) strand; PAM type: YTN; PAM sequence: TTC
aatatagtaattttttagtg

SEQ ID NO: 81960 - DNA, 20 bp, Artificial Sequence
  Description of Artificial Sequence: Synthetic oligonucleotide
  Target: SCNA; (+) strand; PAM type: YTN; PAM sequence: TTT
tttagtgtctaatgtatctg

SEQ ID NO: 81961 - DNA, 20 bp, Artificial Sequence
  Description of Artificial Sequence: Synthetic oligonucleotide
  Target: SCNA; (+) strand; PAM type: YTN; PAM sequence: TTT
ttagtgtctaatgtatctga

SEQ ID NO: 81962 - DNA, 20 bp, Artificial Sequence
  Description of Artificial Sequence: Synthetic oligonucleotide
  Target: SCNA; (+) strand; PAM type: YTN; PAM sequence: TTT
tagtgtctaatgtatctgat

SEQ ID NO: 81963 - DNA, 20 bp, Artificial Sequence
  Description of Artificial Sequence: Synthetic oligonucleotide
  Target: SCNA; (+) strand; PAM type: YTN; PAM sequence: TTT
agtgtctaatgtatctgata

SEQ ID NO: 81964 - DNA, 20 bp, Artificial Sequence
  Description of Artificial Sequence: Synthetic oligonucleotide
  Target: SCNA; (+) strand; PAM type: YTN; PAM sequence: TTA
gtgtctaatgtatctgatag

SEQ ID NO: 81965 - DNA, 20 bp, Artificial Sequence
  Description of Artificial Sequence: Synthetic oligonucleotide
  Target: SCNA; (+) strand; PAM type: YTN; PAM sequence: CTA
atgtatctgatagcatcatg

SEQ ID NO: 81966 - DNA, 20 bp, Artificial Sequence
  Description of Artificial Sequence: Synthetic oligonucleotide
  Target: SCNA; (+) strand; PAM type: YTN; PAM sequence: CTG
atagcatcatgttgcatacc

SEQ ID NO: 81967 - DNA, 20 bp, Artificial Sequence
  Description of Artificial Sequence: Synthetic oligonucleotide
  Target: SCNA; (+) strand; PAM type: YTN; PAM sequence: TTG
cataccctaaatatacacaa

SEQ ID NO: 81968 - DNA, 20 bp, Artificial Sequence
  Description of Artificial Sequence: Synthetic oligonucleotide
  Target: SCNA; (+) strand; PAM type: YTN; PAM sequence: CTA
aatatacacaattaaattta

SEQ ID NO: 81969 - DNA, 20 bp, Artificial Sequence
  Description of Artificial Sequence: Synthetic oligonucleotide
  Target: SCNA; (+) strand; PAM type: YTN; PAM sequence: TTA
aatttatttttaaaaaagaa

SEQ ID NO: 81970 - DNA, 20 bp, Artificial Sequence
  Description of Artificial Sequence: Synthetic oligonucleotide
  Target: SCNA; (+) strand; PAM type: YTN; PAM sequence: TTT
atttttaaaaaagaatgcca

SEQ ID NO: 81971 - DNA, 20 bp, Artificial Sequence
  Description of Artificial Sequence: Synthetic oligonucleotide
  Target: SCNA; (+) strand; PAM type: YTN; PAM sequence: TTA
tttttaaaaaagaatgccac

SEQ ID NO: 81972 - DNA, 20 bp, Artificial Sequence
  Description of Artificial Sequence: Synthetic oligonucleotide
  Target: SCNA; (+) strand; PAM type: YTN; PAM sequence: TTT
ttaaaaaagaatgccactag

SEQ ID NO: 81973 - DNA, 20 bp, Artificial Sequence
  Description of Artificial Sequence: Synthetic oligonucleotide
  Target: SCNA; (+) strand; PAM type: YTN; PAM sequence: TTT
taaaaaagaatgccactagg

SEQ ID NO: 81974 - DNA, 20 bp, Artificial Sequence
  Description of Artificial Sequence: Synthetic oligonucleotide
  Target: SCNA; (+) strand; PAM type: YTN; PAM sequence: TTT
aaaaaagaatgccactaggc

SEQ ID NO: 81975 - DNA, 20 bp, Artificial Sequence
  Description of Artificial Sequence: Synthetic oligonucleotide
  Target: SCNA; (+) strand; PAM type: YTN; PAM sequence: TTA
aaaaagaatgccactaggcc

SEQ ID NO: 81976 - DNA, 20 bp, Artificial Sequence
  Description of Artificial Sequence: Synthetic oligonucleotide
  Target: SCNA; (+) strand; PAM type: YTN; PAM sequence: CTA
ggccgggtgcaatggctcac

SEQ ID NO: 81977 - DNA, 20 bp, Artificial Sequence
  Description of Artificial Sequence: Synthetic oligonucleotide
  Target: SCNA; (+) strand; PAM type: YTN; PAM sequence: CTC
acgcctgtaatcccagcatt

SEQ ID NO: 81978 - DNA, 20 bp, Artificial Sequence
  Description of Artificial Sequence: Synthetic oligonucleotide
  Target: SCNA; (+) strand; PAM type: YTN; PAM sequence: CTG
taatcccagcattttgggag

SEQ ID NO: 81979 - DNA, 20 bp, Artificial Sequence
  Description of Artificial Sequence: Synthetic oligonucleotide
  Target: SCNA; (+) strand; PAM type: YTN; PAM sequence: TTT
tgggaggccgaggtcgggga

SEQ ID NO: 81980 - DNA, 20 bp, Artificial Sequence
  Description of Artificial Sequence: Synthetic oligonucleotide
  Target: SCNA; (+) strand; PAM type: YTN; PAM sequence: TTT
gggaggccgaggtcggggat

SEQ ID NO: 81981 - DNA, 20 bp, Artificial Sequence
  Description of Artificial Sequence: Synthetic oligonucleotide
  Target: SCNA; (+) strand; PAM type: YTN; PAM sequence: TTG
ggaggccgaggtcggggatg

SEQ ID NO: 81982 - DNA, 20 bp, Artificial Sequence
  Description of Artificial Sequence: Synthetic oligonucleotide
  Target: SCNA; (+) strand; PAM type: YTN; PAM sequence: TTC
gagaccatcctggctaacat

SEQ ID NO: 81983 - DNA, 20 bp, Artificial Sequence
  Description of Artificial Sequence: Synthetic oligonucleotide
  Target: SCNA; (+) strand; PAM type: YTN; PAM sequence: CTG
gctaacatggtgaaacccca

SEQ ID NO: 81984 - DNA, 20 bp, Artificial Sequence
  Description of Artificial Sequence: Synthetic oligonucleotide
  Target: SCNA; (+) strand; PAM type: YTN; PAM sequence: CTA
acatggtgaaaccccatctc

SEQ ID NO: 81985 - DNA, 20 bp, Artificial Sequence
  Description of Artificial Sequence: Synthetic oligonucleotide
  Target: SCNA; (+) strand; PAM type: YTN; PAM sequence: CTC
tactaaaaatacaaaaatta

SEQ ID NO: 81986 - DNA, 20 bp, Artificial Sequence
  Description of Artificial Sequence: Synthetic oligonucleotide
  Target: SCNA; (+) strand; PAM type: YTN; PAM sequence: CTA
ctaaaaatacaaaaattagc

SEQ ID NO: 81987 - DNA, 20 bp, Artificial Sequence
  Description of Artificial Sequence: Synthetic oligonucleotide
  Target: SCNA; (+) strand; PAM type: YTN; PAM sequence: CTA
aaaatacaaaaattagccgg

SEQ ID NO: 81988 - DNA, 20 bp, Artificial Sequence
  Description of Artificial Sequence: Synthetic oligonucleotide
  Target: SCNA; (+) strand; PAM type: YTN; PAM sequence: TTA
gccgggcatggtggtgcatg

SEQ ID NO: 81989 - DNA, 20 bp, Artificial Sequence
  Description of Artificial Sequence: Synthetic oligonucleotide
  Target: SCNA; (+) strand; PAM type: YTN; PAM sequence: CTG
taatttcagctactcaggag

SEQ ID NO: 81990 - DNA, 20 bp, Artificial Sequence
  Description of Artificial Sequence: Synthetic oligonucleotide
  Target: SCNA; (+) strand; PAM type: YTN; PAM sequence: TTT
cagctactcaggaggctgag

SEQ ID NO: 81991 - DNA, 20 bp, Artificial Sequence
  Description of Artificial Sequence: Synthetic oligonucleotide
  Target: SCNA; (+) strand; PAM type: YTN; PAM sequence: TTC
agctactcaggaggctgagt

SEQ ID NO: 81992 - DNA, 20 bp, Artificial Sequence
  Description of Artificial Sequence: Synthetic oligonucleotide
  Target: SCNA; (+) strand; PAM type: YTN; PAM sequence: CTA
ctcaggaggctgagtcagga

SEQ ID NO: 81993 - DNA, 20 bp, Artificial Sequence
  Description of Artificial Sequence: Synthetic oligonucleotide
  Target: SCNA; (+) strand; PAM type: YTN; PAM sequence: CTC
aggaggctgagtcaggagaa

SEQ ID NO: 81994 - DNA, 20 bp, Artificial Sequence
  Description of Artificial Sequence: Synthetic oligonucleotide
  Target: SCNA; (+) strand; PAM type: YTN; PAM sequence: CTG
agtcaggagaataacttgaa

SEQ ID NO: 81995 - DNA, 20 bp, Artificial Sequence
  Description of Artificial Sequence: Synthetic oligonucleotide
  Target: SCNA; (+) strand; PAM type: YTN; PAM sequence: CTT
gaacccaggaggcggaggtt

SEQ ID NO: 81996 - DNA, 20 bp, Artificial Sequence
  Description of Artificial Sequence: Synthetic oligonucleotide
  Target: SCNA; (+) strand; PAM type: YTN; PAM sequence: TTG
aacccaggaggcggaggttg

SEQ ID NO: 81997 - DNA, 20 bp, Artificial Sequence
  Description of Artificial Sequence: Synthetic oligonucleotide
  Target: SCNA; (+) strand; PAM type: YTN; PAM sequence: TTG
cagtgagccgagatcacacc

SEQ ID NO: 81998 - DNA, 20 bp, Artificial Sequence
  Description of Artificial Sequence: Synthetic oligonucleotide
  Target: SCNA; (+) strand; PAM type: YTN; PAM sequence: CTG
cacttcagcctggagtgaaa

SEQ ID NO: 81999 - DNA, 20 bp, Artificial Sequence
  Description of Artificial Sequence: Synthetic oligonucleotide
  Target: SCNA; (+) strand; PAM type: YTN; PAM sequence: CTT
cagcctggagtgaaatgaca

SEQ ID NO: 82000 - DNA, 20 bp, Artificial Sequence
  Description of Artificial Sequence: Synthetic oligonucleotide
  Target: SCNA; (+) strand; PAM type: YTN; PAM sequence: TTC
agcctggagtgaaatgacag

SEQ ID NO: 82001 - DNA, 20 bp, Artificial Sequence
  Description of Artificial Sequence: Synthetic oligonucleotide
  Target: SCNA; (+) strand; PAM type: YTN; PAM sequence: CTG
gagtgaaatgacagattgag

SEQ ID NO: 82002 - DNA, 20 bp, Artificial Sequence
  Description of Artificial Sequence: Synthetic oligonucleotide
  Target: SCNA; (+) strand; PAM type: YTN; PAM sequence: TTG
agaccctatctcagaaaaaa

SEQ ID NO: 82003 - DNA, 20 bp, Artificial Sequence
  Description of Artificial Sequence: Synthetic oligonucleotide
  Target: SCNA; (+) strand; PAM type: YTN; PAM sequence: CTA
tctcagaaaaaaagaaaaaa

SEQ ID NO: 82004 - DNA, 20 bp, Artificial Sequence
  Description of Artificial Sequence: Synthetic oligonucleotide
  Target: SCNA; (+) strand; PAM type: YTN; PAM sequence: CTC
agaaaaaaagaaaaaaaaaa

SEQ ID NO: 82005 - DNA, 20 bp, Artificial Sequence
  Description of Artificial Sequence: Synthetic oligonucleotide
  Target: SCNA; (+) strand; PAM type: YTN; PAM sequence: CTA
aaccacaccattagaactta

SEQ ID NO: 82006 - DNA, 20 bp, Artificial Sequence
  Description of Artificial Sequence: Synthetic oligonucleotide
  Target: SCNA; (+) strand; PAM type: YTN; PAM sequence: TTA
gaacttataattaattattt

SEQ ID NO: 82007 - DNA, 20 bp, Artificial Sequence
  Description of Artificial Sequence: Synthetic oligonucleotide
  Target: SCNA; (+) strand; PAM type: YTN; PAM sequence: CTT
ataattaattattttttata

SEQ ID NO: 82008 - DNA, 20 bp, Artificial Sequence
  Description of Artificial Sequence: Synthetic oligonucleotide
  Target: SCNA; (+) strand; PAM type: YTN; PAM sequence: TTA
taattaattattttttataa

SEQ ID NO: 82009 - DNA, 20 bp, Artificial Sequence
  Description of Artificial Sequence: Synthetic oligonucleotide
  Target: SCNA; (+) strand; PAM type: YTN; PAM sequence: TTA
attattttttataaatatct

SEQ ID NO: 82010 - DNA, 20 bp, Artificial Sequence
  Description of Artificial Sequence: Synthetic oligonucleotide
  Target: SCNA; (+) strand; PAM type: YTN; PAM sequence: TTA
ttttttataaatatcttatg

SEQ ID NO: 82011 - DNA, 20 bp, Artificial Sequence
  Description of Artificial Sequence: Synthetic oligonucleotide
  Target: SCNA; (+) strand; PAM type: YTN; PAM sequence: TTT
tttataaatatcttatgcaa

SEQ ID NO: 82012 - DNA, 20 bp, Artificial Sequence
  Description of Artificial Sequence: Synthetic oligonucleotide
  Target: SCNA; (+) strand; PAM type: YTN; PAM sequence: TTT
ttataaatatcttatgcaac

SEQ ID NO: 82013 - DNA, 20 bp, Artificial Sequence
  Description of Artificial Sequence: Synthetic oligonucleotide
  Target: SCNA; (+) strand; PAM type: YTN; PAM sequence: TTT
tataaatatcttatgcaaca

SEQ ID NO: 82014 - DNA, 20 bp, Artificial Sequence
  Description of Artificial Sequence: Synthetic oligonucleotide
  Target: SCNA; (+) strand; PAM type: YTN; PAM sequence: TTT
ataaatatcttatgcaacat

SEQ ID NO: 82015 - DNA, 20 bp, Artificial Sequence
  Description of Artificial Sequence: Synthetic oligonucleotide
  Target: SCNA; (+) strand; PAM type: YTN; PAM sequence: TTA
taaatatcttatgcaacata

SEQ ID NO: 82016 - DNA, 20 bp, Artificial Sequence
  Description of Artificial Sequence: Synthetic oligonucleotide
  Target: SCNA; (+) strand; PAM type: YTN; PAM sequence: CTT
atgcaacatattttatattt

SEQ ID NO: 82017 - DNA, 20 bp, Artificial Sequence
  Description of Artificial Sequence: Synthetic oligonucleotide
  Target: SCNA; (+) strand; PAM type: YTN; PAM sequence: TTA
tgcaacatattttatatttt

SEQ ID NO: 82018 - DNA, 20 bp, Artificial Sequence
  Description of Artificial Sequence: Synthetic oligonucleotide
  Target: SCNA; (+) strand; PAM type: YTN; PAM sequence: TTT
tatatttttgtagtgcaacc

SEQ ID NO: 82019 - DNA, 20 bp, Artificial Sequence
  Description of Artificial Sequence: Synthetic oligonucleotide
  Target: SCNA; (+) strand; PAM type: YTN; PAM sequence: TTT
atatttttgtagtgcaaccc

SEQ ID NO: 82020 - DNA, 20 bp, Artificial Sequence
  Description of Artificial Sequence: Synthetic oligonucleotide
  Target: SCNA; (+) strand; PAM type: YTN; PAM sequence: TTA
tatttttgtagtgcaacccc

SEQ ID NO: 82021 - DNA, 20 bp, Artificial Sequence
  Description of Artificial Sequence: Synthetic oligonucleotide
  Target: SCNA; (+) strand; PAM type: YTN; PAM sequence: TTT
ttgtagtgcaaccccaaaga

SEQ ID NO: 82022 - DNA, 20 bp, Artificial Sequence
  Description of Artificial Sequence: Synthetic oligonucleotide
  Target: SCNA; (+) strand; PAM type: YTN; PAM sequence: TTT
tgtagtgcaaccccaaagag

SEQ ID NO: 82023 - DNA, 20 bp, Artificial Sequence
  Description of Artificial Sequence: Synthetic oligonucleotide
  Target: SCNA; (+) strand; PAM type: YTN; PAM sequence: TTT
gtagtgcaaccccaaagaga

SEQ ID NO: 82024 - DNA, 20 bp, Artificial Sequence
  Description of Artificial Sequence: Synthetic oligonucleotide
  Target: SCNA; (+) strand; PAM type: YTN; PAM sequence: TTG
tagtgcaaccccaaagagat

SEQ ID NO: 82025 - DNA, 20 bp, Artificial Sequence
  Description of Artificial Sequence: Synthetic oligonucleotide
  Target: SCNA; (+) strand; PAM type: YTN; PAM sequence: CTT
aaaaaaacgagataaatgag

SEQ ID NO: 82026 - DNA, 20 bp, Artificial Sequence
  Description of Artificial Sequence: Synthetic oligonucleotide
  Target: SCNA; (+) strand; PAM type: YTN; PAM sequence: TTA
aaaaaacgagataaatgaga

SEQ ID NO: 82027 - DNA, 20 bp, Artificial Sequence
  Description of Artificial Sequence: Synthetic oligonucleotide
  Target: SCNA; (+) strand; PAM type: YTN; PAM sequence: CTC
ataaggttaccatgtatcaa

SEQ ID NO: 82028 - DNA, 20 bp, Artificial Sequence
  Description of Artificial Sequence: Synthetic oligonucleotide
  Target: SCNA; (+) strand; PAM type: YTN; PAM sequence: TTA
ccatgtatcaaaccaatcag

SEQ ID NO: 82029 - DNA, 20 bp, Artificial Sequence
  Description of Artificial Sequence: Synthetic oligonucleotide
  Target: SCNA; (+) strand; PAM type: YTN; PAM sequence: TTG
ttctttgaggtcataattat

SEQ ID NO: 82030 - DNA, 20 bp, Artificial Sequence
  Description of Artificial Sequence: Synthetic oligonucleotide
  Target: SCNA; (+) strand; PAM type: YTN; PAM sequence: TTC
tttgaggtcataattattta

SEQ ID NO: 82031 - DNA, 20 bp, Artificial Sequence
  Description of Artificial Sequence: Synthetic oligonucleotide
  Target: SCNA; (+) strand; PAM type: YTN; PAM sequence: CTT
tgaggtcataattatttact

SEQ ID NO: 82032 - DNA, 20 bp, Artificial Sequence
  Description of Artificial Sequence: Synthetic oligonucleotide
  Target: SCNA; (+) strand; PAM type: YTN; PAM sequence: TTT
gaggtcataattatttacta

SEQ ID NO: 82033 - DNA, 20 bp, Artificial Sequence
  Description of Artificial Sequence: Synthetic oligonucleotide
  Target: SCNA; (+) strand; PAM type: YTN; PAM sequence: TTG
aggtcataattatttactaa

SEQ ID NO: 82034 - DNA, 20 bp, Artificial Sequence
  Description of Artificial Sequence: Synthetic oligonucleotide
  Target: SCNA; (+) strand; PAM type: YTN; PAM sequence: TTA
tttactaataatctgtaatt

SEQ ID NO: 82035 - DNA, 20 bp, Artificial Sequence
  Description of Artificial Sequence: Synthetic oligonucleotide
  Target: SCNA; (+) strand; PAM type: YTN; PAM sequence: TTT
actaataatctgtaattgat

SEQ ID NO: 82036 - DNA, 20 bp, Artificial Sequence
  Description of Artificial Sequence: Synthetic oligonucleotide
  Target: SCNA; (+) strand; PAM type: YTN; PAM sequence: TTA
ctaataatctgtaattgatg

SEQ ID NO: 82037 - DNA, 20 bp, Artificial Sequence
  Description of Artificial Sequence: Synthetic oligonucleotide
  Target: SCNA; (+) strand; PAM type: YTN; PAM sequence: CTA
ataatctgtaattgatggtt

SEQ ID NO: 82038 - DNA, 20 bp, Artificial Sequence
  Description of Artificial Sequence: Synthetic oligonucleotide
  Target: SCNA; (+) strand; PAM type: YTN; PAM sequence: CTG
taattgatggttagccttta

SEQ ID NO: 82039 - DNA, 20 bp, Artificial Sequence
  Description of Artificial Sequence: Synthetic oligonucleotide
  Target: SCNA; (+) strand; PAM type: YTN; PAM sequence: TTG
atggttagcctttaatttat

SEQ ID NO: 82040 - DNA, 20 bp, Artificial Sequence
  Description of Artificial Sequence: Synthetic oligonucleotide
  Target: SCNA; (+) strand; PAM type: YTN; PAM sequence: TTA
gcctttaatttatgagtaat

SEQ ID NO: 82041 - DNA, 20 bp, Artificial Sequence
  Description of Artificial Sequence: Synthetic oligonucleotide
  Target: SCNA; (+) strand; PAM type: YTN; PAM sequence: CTT
taatttatgagtaatctgta

SEQ ID NO: 82042 - DNA, 20 bp, Artificial Sequence
  Description of Artificial Sequence: Synthetic oligonucleotide
  Target: SCNA; (+) strand; PAM type: YTN; PAM sequence: TTT
aatttatgagtaatctgtaa

SEQ ID NO: 82043 - DNA, 20 bp, Artificial Sequence
  Description of Artificial Sequence: Synthetic oligonucleotide
  Target: SCNA; (+) strand; PAM type: YTN; PAM sequence: TTA
atttatgagtaatctgtaat

SEQ ID NO: 82044 - DNA, 20 bp, Artificial Sequence
  Description of Artificial Sequence: Synthetic oligonucleotide
  Target: SCNA; (+) strand; PAM type: YTN; PAM sequence: TTT
atgagtaatctgtaattgat

SEQ ID NO: 82045 - DNA, 20 bp, Artificial Sequence
  Description of Artificial Sequence: Synthetic oligonucleotide
  Target: SCNA; (+) strand; PAM type: YTN; PAM sequence: TTA
tgagtaatctgtaattgata

SEQ ID NO: 82046 - DNA, 20 bp, Artificial Sequence
  Description of Artificial Sequence: Synthetic oligonucleotide
  Target: SCNA; (+) strand; PAM type: YTN; PAM sequence: CTG
taattgataacgtacaccta

SEQ ID NO: 82047 - DNA, 20 bp, Artificial Sequence
  Description of Artificial Sequence: Synthetic oligonucleotide
  Target: SCNA; (+) strand; PAM type: YTN; PAM sequence: TTG
ataacgtacacctacaaaat

SEQ ID NO: 82048 - DNA, 20 bp, Artificial Sequence
  Description of Artificial Sequence: Synthetic oligonucleotide
  Target: SCNA; (+) strand; PAM type: YTN; PAM sequence: CTA
caaaataggtgccaagtggt

SEQ ID NO: 82049 - DNA, 20 bp, Artificial Sequence
  Description of Artificial Sequence: Synthetic oligonucleotide
  Target: SCNA; (+) strand; PAM type: YTN; PAM sequence: TTA
tgtgactagcaaggtataaa

SEQ ID NO: 82050 - DNA, 20 bp, Artificial Sequence
  Description of Artificial Sequence: Synthetic oligonucleotide
  Target: SCNA; (+) strand; PAM type: YTN; PAM sequence: CTA
gcaaggtataaatgctgtag

SEQ ID NO: 82051 - DNA, 20 bp, Artificial Sequence
  Description of Artificial Sequence: Synthetic oligonucleotide
  Target: SCNA; (+) strand; PAM type: YTN; PAM sequence: CTG
tagggacaccagagctgatg

SEQ ID NO: 82052 - DNA, 20 bp, Artificial Sequence
  Description of Artificial Sequence: Synthetic oligonucleotide
  Target: SCNA; (+) strand; PAM type: YTN; PAM sequence: CTG
atggcttccctgagcggagg

SEQ ID NO: 82053 - DNA, 20 bp, Artificial Sequence
  Description of Artificial Sequence: Synthetic oligonucleotide
  Target: SCNA; (+) strand; PAM type: YTN; PAM sequence: CTT
ccctgagcggaggtgtccca

SEQ ID NO: 82054 - DNA, 20 bp, Artificial Sequence
  Description of Artificial Sequence: Synthetic oligonucleotide
  Target: SCNA; (+) strand; PAM type: YTN; PAM sequence: TTC
cctgagcggaggtgtcccac

SEQ ID NO: 82055 - DNA, 20 bp, Artificial Sequence
  Description of Artificial Sequence: Synthetic oligonucleotide
  Target: SCNA; (+) strand; PAM type: YTN; PAM sequence: CTG
agcggaggtgtcccacacac

SEQ ID NO: 82056 - DNA, 20 bp, Artificial Sequence
  Description of Artificial Sequence: Synthetic oligonucleotide
  Target: SCNA; (+) strand; PAM type: YTN; PAM sequence: CTA
tcttgtcttcccaacctcaa

SEQ ID NO: 82057 - DNA, 20 bp, Artificial Sequence
  Description of Artificial Sequence: Synthetic oligonucleotide
  Target: SCNA; (+) strand; PAM type: YTN; PAM sequence: CTT
gtcttcccaacctcaaaaga

SEQ ID NO: 82058 - DNA, 20 bp, Artificial Sequence
  Description of Artificial Sequence: Synthetic oligonucleotide
  Target: SCNA; (+) strand; PAM type: YTN; PAM sequence: TTG
tcttcccaacctcaaaagag

SEQ ID NO: 82059 - DNA, 20 bp, Artificial Sequence
  Description of Artificial Sequence: Synthetic oligonucleotide
  Target: SCNA; (+) strand; PAM type: YTN; PAM sequence: CTT
cccaacctcaaaagagcaca

SEQ ID NO: 82060 - DNA, 20 bp, Artificial Sequence
  Description of Artificial Sequence: Synthetic oligonucleotide
  Target: SCNA; (+) strand; PAM type: YTN; PAM sequence: TTC
ccaacctcaaaagagcacag

SEQ ID NO: 82061 - DNA, 20 bp, Artificial Sequence
  Description of Artificial Sequence: Synthetic oligonucleotide
  Target: SCNA; (+) strand; PAM type: YTN; PAM sequence: CTC
aaaagagcacagagtggaga

SEQ ID NO: 82062 - DNA, 20 bp, Artificial Sequence
  Description of Artificial Sequence: Synthetic oligonucleotide
  Target: SCNA; (+) strand; PAM type: YTN; PAM sequence: CTG
agagttttgagaactcagtt

SEQ ID NO: 82063 - DNA, 20 bp, Artificial Sequence
  Description of Artificial Sequence: Synthetic oligonucleotide
  Target: SCNA; (+) strand; PAM type: YTN; PAM sequence: TTT
tgagaactcagttatccctg

SEQ ID NO: 82064 - DNA, 20 bp, Artificial Sequence
  Description of Artificial Sequence: Synthetic oligonucleotide
  Target: SCNA; (+) strand; PAM type: YTN; PAM sequence: TTT
gagaactcagttatccctgt

SEQ ID NO: 82065 - DNA, 20 bp, Artificial Sequence
  Description of Artificial Sequence: Synthetic oligonucleotide
  Target: SCNA; (+) strand; PAM type: YTN; PAM sequence: TTG
agaactcagttatccctgtt

SEQ ID NO: 82066 - DNA, 20 bp, Artificial Sequence
  Description of Artificial Sequence: Synthetic oligonucleotide
  Target: SCNA; (+) strand; PAM type: YTN; PAM sequence: CTC
agttatccctgttgtgcatg

SEQ ID NO: 82067 - DNA, 20 bp, Artificial Sequence
  Description of Artificial Sequence: Synthetic oligonucleotide
  Target: SCNA; (+) strand; PAM type: YTN; PAM sequence: TTA
tccctgttgtgcatgttatg

SEQ ID NO: 82068 - DNA, 20 bp, Artificial Sequence
  Description of Artificial Sequence: Synthetic oligonucleotide
  Target: SCNA; (+) strand; PAM type: YTN; PAM sequence: CTG
ttgtgcatgttatgttgact

SEQ ID NO: 82069 - DNA, 20 bp, Artificial Sequence
  Description of Artificial Sequence: Synthetic oligonucleotide
  Target: SCNA; (+) strand; PAM type: YTN; PAM sequence: TTG
tgcatgttatgttgactttg

SEQ ID NO: 82070 - DNA, 20 bp, Artificial Sequence
  Description of Artificial Sequence: Synthetic oligonucleotide
  Target: SCNA; (+) strand; PAM type: YTN; PAM sequence: TTA
tgttgactttgtcagcttag

SEQ ID NO: 82071 - DNA, 20 bp, Artificial Sequence
  Description of Artificial Sequence: Synthetic oligonucleotide
  Target: SCNA; (+) strand; PAM type: YTN; PAM sequence: TTG
actttgtcagcttagtgagg

SEQ ID NO: 82072 - DNA, 20 bp, Artificial Sequence
  Description of Artificial Sequence: Synthetic oligonucleotide
  Target: SCNA; (+) strand; PAM type: YTN; PAM sequence: CTT
tgtcagcttagtgaggtgaa

SEQ ID NO: 82073 - DNA, 20 bp, Artificial Sequence
  Description of Artificial Sequence: Synthetic oligonucleotide
  Target: SCNA; (+) strand; PAM type: YTN; PAM sequence: TTT
gtcagcttagtgaggtgaag

SEQ ID NO: 82074 - DNA, 20 bp, Artificial Sequence
  Description of Artificial Sequence: Synthetic oligonucleotide
  Target: SCNA; (+) strand; PAM type: YTN; PAM sequence: TTG
tcagcttagtgaggtgaagc

SEQ ID NO: 82075 - DNA, 20 bp, Artificial Sequence
  Description of Artificial Sequence: Synthetic oligonucleotide
  Target: SCNA; (+) strand; PAM type: YTN; PAM sequence: CTT
agtgaggtgaagcacatttt

SEQ ID NO: 82076 - DNA, 20 bp, Artificial Sequence
  Description of Artificial Sequence: Synthetic oligonucleotide
  Target: SCNA; (+) strand; PAM type: YTN; PAM sequence: TTA
gtgaggtgaagcacattttg

SEQ ID NO: 82077 - DNA, 20 bp, Artificial Sequence
  Description of Artificial Sequence: Synthetic oligonucleotide
  Target: SCNA; (+) strand; PAM type: YTN; PAM sequence: TTT
tgacttgagaatttgctatc

SEQ ID NO: 82078 - DNA, 20 bp, Artificial Sequence
  Description of Artificial Sequence: Synthetic oligonucleotide
  Target: SCNA; (+) strand; PAM type: YTN; PAM sequence: TTT
gacttgagaatttgctatca

SEQ ID NO: 82079 - DNA, 20 bp, Artificial Sequence
  Description of Artificial Sequence: Synthetic oligonucleotide
  Target: SCNA; (+) strand; PAM type: YTN; PAM sequence: TTG
acttgagaatttgctatcaa

SEQ ID NO: 82080 - DNA, 20 bp, Artificial Sequence
  Description of Artificial Sequence: Synthetic oligonucleotide
  Target: SCNA; (+) strand; PAM type: YTN; PAM sequence: CTT
gagaatttgctatcaatttc

SEQ ID NO: 82081 - DNA, 20 bp, Artificial Sequence
  Description of Artificial Sequence: Synthetic oligonucleotide
  Target: SCNA; (+) strand; PAM type: YTN; PAM sequence: TTG
agaatttgctatcaatttca

SEQ ID NO: 82082 - DNA, 20 bp, Artificial Sequence
  Description of Artificial Sequence: Synthetic oligonucleotide
  Target: SCNA; (+) strand; PAM type: YTN; PAM sequence: TTT
gctatcaatttcactgatgg

SEQ ID NO: 82083 - DNA, 20 bp, Artificial Sequence
  Description of Artificial Sequence: Synthetic oligonucleotide
  Target: SCNA; (+) strand; PAM type: YTN; PAM sequence: TTG
ctatcaatttcactgatggc

SEQ ID NO: 82084 - DNA, 20 bp, Artificial Sequence
  Description of Artificial Sequence: Synthetic oligonucleotide
  Target: SCNA; (+) strand; PAM type: YTN; PAM sequence: CTA
tcaatttcactgatggccac

SEQ ID NO: 82085 - DNA, 20 bp, Artificial Sequence
  Description of Artificial Sequence: Synthetic oligonucleotide
  Target: SCNA; (+) strand; PAM type: YTN; PAM sequence: TTT
cactgatggccactgctgct

SEQ ID NO: 82086 - DNA, 20 bp, Artificial Sequence
  Description of Artificial Sequence: Synthetic oligonucleotide
  Target: SCNA; (+) strand; PAM type: YTN; PAM sequence: TTC
actgatggccactgctgctt

SEQ ID NO: 82087 - DNA, 20 bp, Artificial Sequence
  Description of Artificial Sequence: Synthetic oligonucleotide
  Target: SCNA; (+) strand; PAM type: YTN; PAM sequence: CTG
atggccactgctgcttattg

SEQ ID NO: 82088 - DNA, 20 bp, Artificial Sequence
  Description of Artificial Sequence: Synthetic oligonucleotide
  Target: SCNA; (+) strand; PAM type: YTN; PAM sequence: CTG
ctgcttattgagcagagtgg

SEQ ID NO: 82089 - DNA, 20 bp, Artificial Sequence
  Description of Artificial Sequence: Synthetic oligonucleotide
  Target: SCNA; (+) strand; PAM type: YTN; PAM sequence: CTG
cttattgagcagagtggcat

SEQ ID NO: 82090 - DNA, 20 bp, Artificial Sequence
  Description of Artificial Sequence: Synthetic oligonucleotide
  Target: SCNA; (+) strand; PAM type: YTN; PAM sequence: CTT
attgagcagagtggcattgg

SEQ ID NO: 82091 - DNA, 20 bp, Artificial Sequence
  Description of Artificial Sequence: Synthetic oligonucleotide
  Target: SCNA; (+) strand; PAM type: YTN; PAM sequence: TTA
ttgagcagagtggcattgga

SEQ ID NO: 82092 - DNA, 20 bp, Artificial Sequence
  Description of Artificial Sequence: Synthetic oligonucleotide
  Target: SCNA; (+) strand; PAM type: YTN; PAM sequence: TTG
agcagagtggcattggaaga

SEQ ID NO: 82093 - DNA, 20 bp, Artificial Sequence
  Description of Artificial Sequence: Synthetic oligonucleotide
  Target: SCNA; (+) strand; PAM type: YTN; PAM sequence: TTG
gaagacactcaaagatcatc

SEQ ID NO: 82094 - DNA, 20 bp, Artificial Sequence
  Description of Artificial Sequence: Synthetic oligonucleotide
  Target: SCNA; (+) strand; PAM type: YTN; PAM sequence: CTC
aaagatcatcattttcttgt

SEQ ID NO: 82095 - DNA, 20 bp, Artificial Sequence
  Description of Artificial Sequence: Synthetic oligonucleotide
  Target: SCNA; (+) strand; PAM type: YTN; PAM sequence: TTT
tcttgtatttattgcattta

SEQ ID NO: 82096 - DNA, 20 bp, Artificial Sequence
  Description of Artificial Sequence: Synthetic oligonucleotide
  Target: SCNA; (+) strand; PAM type: YTN; PAM sequence: TTT
cttgtatttattgcatttat

SEQ ID NO: 82097 - DNA, 20 bp, Artificial Sequence
  Description of Artificial Sequence: Synthetic oligonucleotide
  Target: SCNA; (+) strand; PAM type: YTN; PAM sequence: TTC
ttgtatttattgcatttata

SEQ ID NO: 82098 - DNA, 20 bp, Artificial Sequence
  Description of Artificial Sequence: Synthetic oligonucleotide
  Target: SCNA; (+) strand; PAM type: YTN; PAM sequence: CTT
gtatttattgcatttatatt

SEQ ID NO: 82099 - DNA, 20 bp, Artificial Sequence
  Description of Artificial Sequence: Synthetic oligonucleotide
  Target: SCNA; (+) strand; PAM type: YTN; PAM sequence: TTG
tatttattgcatttatatta

SEQ ID NO: 82100 - DNA, 20 bp, Artificial Sequence
  Description of Artificial Sequence: Synthetic oligonucleotide
  Target: SCNA; (+) strand; PAM type: YTN; PAM sequence: TTT
attgcatttatattactgag

SEQ ID NO: 82101 - DNA, 20 bp, Artificial Sequence
  Description of Artificial Sequence: Synthetic oligonucleotide
  Target: SCNA; (+) strand; PAM type: YTN; PAM sequence: TTA
ttgcatttatattactgagc

SEQ ID NO: 82102 - DNA, 20 bp, Artificial Sequence
  Description of Artificial Sequence: Synthetic oligonucleotide
  Target: SCNA; (+) strand; PAM type: YTN; PAM sequence: TTG
catttatattactgagcatt

SEQ ID NO: 82103 - DNA, 20 bp, Artificial Sequence
  Description of Artificial Sequence: Synthetic oligonucleotide
  Target: SCNA; (+) strand; PAM type: YTN; PAM sequence: TTT
atattactgagcattatata

SEQ ID NO: 82104 - DNA, 20 bp, Artificial Sequence
  Description of Artificial Sequence: Synthetic oligonucleotide
  Target: SCNA; (+) strand; PAM type: YTN; PAM sequence: TTA
tattactgagcattatataa

SEQ ID NO: 82105 - DNA, 20 bp, Artificial Sequence
  Description of Artificial Sequence: Synthetic oligonucleotide
  Target: SCNA; (+) strand; PAM type: YTN; PAM sequence: TTA
ctgagcattatataaagata

SEQ ID NO: 82106 - DNA, 20 bp, Artificial Sequence
  Description of Artificial Sequence: Synthetic oligonucleotide
  Target: SCNA; (+) strand; PAM type: YTN; PAM sequence: CTG
agcattatataaagataatt

SEQ ID NO: 82107 - DNA, 20 bp, Artificial Sequence
  Description of Artificial Sequence: Synthetic oligonucleotide
  Target: SCNA; (+) strand; PAM type: YTN; PAM sequence: TTA
tataaagataattaaatctt

SEQ ID NO: 82108 - DNA, 20 bp, Artificial Sequence
  Description of Artificial Sequence: Synthetic oligonucleotide
  Target: SCNA; (+) strand; PAM type: YTN; PAM sequence: TTA
aatctttctgcttttggatt

SEQ ID NO: 82109 - DNA, 20 bp, Artificial Sequence
  Description of Artificial Sequence: Synthetic oligonucleotide
  Target: SCNA; (+) strand; PAM type: YTN; PAM sequence: CTT
tctgcttttggatttagatc

SEQ ID NO: 82110 - DNA, 20 bp, Artificial Sequence
  Description of Artificial Sequence: Synthetic oligonucleotide
  Target: SCNA; (+) strand; PAM type: YTN; PAM sequence: TTT
ctgcttttggatttagatct

SEQ ID NO: 82111 - DNA, 20 bp, Artificial Sequence
  Description of Artificial Sequence: Synthetic oligonucleotide
  Target: SCNA; (+) strand; PAM type: YTN; PAM sequence: TTC
tgcttttggatttagatcta

SEQ ID NO: 82112 - DNA, 20 bp, Artificial Sequence
  Description of Artificial Sequence: Synthetic oligonucleotide
  Target: SCNA; (+) strand; PAM type: YTN; PAM sequence: CTG
cttttggatttagatctaat

SEQ ID NO: 82113 - DNA, 20 bp, Artificial Sequence
  Description of Artificial Sequence: Synthetic oligonucleotide
  Target: SCNA; (+) strand; PAM type: YTN; PAM sequence: CTT
ttggatttagatctaattaa

SEQ ID NO: 82114 - DNA, 20 bp, Artificial Sequence
  Description of Artificial Sequence: Synthetic oligonucleotide
  Target: SCNA; (+) strand; PAM type: YTN; PAM sequence: TTT
tggatttagatctaattaat

SEQ ID NO: 82115 - DNA, 20 bp, Artificial Sequence
  Description of Artificial Sequence: Synthetic oligonucleotide
  Target: SCNA; (+) strand; PAM type: YTN; PAM sequence: TTT
ggatttagatctaattaatt

SEQ ID NO: 82116 - DNA, 20 bp, Artificial Sequence
  Description of Artificial Sequence: Synthetic oligonucleotide
  Target: SCNA; (+) strand; PAM type: YTN; PAM sequence: TTG
gatttagatctaattaattt

SEQ ID NO: 82117 - DNA, 20 bp, Artificial Sequence
  Description of Artificial Sequence: Synthetic oligonucleotide
  Target: SCNA; (+) strand; PAM type: YTN; PAM sequence: TTT
agatctaattaatttctgag

SEQ ID NO: 82118 - DNA, 20 bp, Artificial Sequence
  Description of Artificial Sequence: Synthetic oligonucleotide
  Target: SCNA; (+) strand; PAM type: YTN; PAM sequence: TTA
gatctaattaatttctgagt

SEQ ID NO: 82119 - DNA, 20 bp, Artificial Sequence
  Description of Artificial Sequence: Synthetic oligonucleotide
  Target: SCNA; (+) strand; PAM type: YTN; PAM sequence: CTA
attaatttctgagtcatttg

SEQ ID NO: 82120 - DNA, 20 bp, Artificial Sequence
  Description of Artificial Sequence: Synthetic oligonucleotide
  Target: SCNA; (+) strand; PAM type: YTN; PAM sequence: TTA
atttctgagtcatttgaaga

SEQ ID NO: 82121 - DNA, 20 bp, Artificial Sequence
  Description of Artificial Sequence: Synthetic oligonucleotide
  Target: SCNA; (+) strand; PAM type: YTN; PAM sequence: TTT
ctgagtcatttgaagaaatt

SEQ ID NO: 82122 - DNA, 20 bp, Artificial Sequence
  Description of Artificial Sequence: Synthetic oligonucleotide
  Target: SCNA; (+) strand; PAM type: YTN; PAM sequence: TTC
tgagtcatttgaagaaattt

SEQ ID NO: 82123 - DNA, 20 bp, Artificial Sequence
  Description of Artificial Sequence: Synthetic oligonucleotide
  Target: SCNA; (+) strand; PAM type: YTN; PAM sequence: CTG
agtcatttgaagaaattttt

SEQ ID NO: 82124 - DNA, 20 bp, Artificial Sequence
  Description of Artificial Sequence: Synthetic oligonucleotide
  Target: SCNA; (+) strand; PAM type: YTN; PAM sequence: TTT
gaagaaatttttgtctatta

SEQ ID NO: 82125 - DNA, 20 bp, Artificial Sequence
  Description of Artificial Sequence: Synthetic oligonucleotide
  Target: SCNA; (+) strand; PAM type: YTN; PAM sequence: TTG
aagaaatttttgtctattaa

SEQ ID NO: 82126 - DNA, 20 bp, Artificial Sequence
  Description of Artificial Sequence: Synthetic oligonucleotide
  Target: SCNA; (+) strand; PAM type: YTN; PAM sequence: TTT
ttgtctattaaattgaagta

SEQ ID NO: 82127 - DNA, 20 bp, Artificial Sequence
  Description of Artificial Sequence: Synthetic oligonucleotide
  Target: SCNA; (+) strand; PAM type: YTN; PAM sequence: TTT
tgtctattaaattgaagtat

SEQ ID NO: 82128 - DNA, 20 bp, Artificial Sequence
  Description of Artificial Sequence: Synthetic oligonucleotide
  Target: SCNA; (+) strand; PAM type: YTN; PAM sequence: TTT
gtctattaaattgaagtatg

SEQ ID NO: 82129 - DNA, 20 bp, Artificial Sequence
  Description of Artificial Sequence: Synthetic oligonucleotide
  Target: SCNA; (+) strand; PAM type: YTN; PAM sequence: TTG
tctattaaattgaagtatgt

SEQ ID NO: 82130 - DNA, 20 bp, Artificial Sequence
  Description of Artificial Sequence: Synthetic oligonucleotide
  Target: SCNA; (+) strand; PAM type: YTN; PAM sequence: CTA
ttaaattgaagtatgttgat

SEQ ID NO: 82131 - DNA, 20 bp, Artificial Sequence
  Description of Artificial Sequence: Synthetic oligonucleotide
  Target: SCNA; (+) strand; PAM type: YTN; PAM sequence: TTA
aattgaagtatgttgattga

SEQ ID NO: 82132 - DNA, 20 bp, Artificial Sequence
  Description of Artificial Sequence: Synthetic oligonucleotide
  Target: SCNA; (+) strand; PAM type: YTN; PAM sequence: TTG
aagtatgttgattgaaaatt

SEQ ID NO: 82133 - DNA, 20 bp, Artificial Sequence
  Description of Artificial Sequence: Synthetic oligonucleotide
  Target: SCNA; (+) strand; PAM type: YTN; PAM sequence: TTG
attgaaaattggtgtacgca

SEQ ID NO: 82134 - DNA, 20 bp, Artificial Sequence
  Description of Artificial Sequence: Synthetic oligonucleotide
  Target: SCNA; (+) strand; PAM type: YTN; PAM sequence: TTG
aaaattggtgtacgcagata

SEQ ID NO: 82135 - DNA, 20 bp, Artificial Sequence
  Description of Artificial Sequence: Synthetic oligonucleotide
  Target: SCNA; (+) strand; PAM type: YTN; PAM sequence: TTG
gtgtacgcagataacaaaaa

SEQ ID NO: 82136 - DNA, 20 bp, Artificial Sequence
  Description of Artificial Sequence: Synthetic oligonucleotide
  Target: SCNA; (+) strand; PAM type: YTN; PAM sequence: CTG
atcattaaggtagttcttca

SEQ ID NO: 82137 - DNA, 20 bp, Artificial Sequence
  Description of Artificial Sequence: Synthetic oligonucleotide
  Target: SCNA; (+) strand; PAM type: YTN; PAM sequence: TTA
aggtagttcttcaatgagtt

SEQ ID NO: 82138 - DNA, 20 bp, Artificial Sequence
  Description of Artificial Sequence: Synthetic oligonucleotide
  Target: SCNA; (+) strand; PAM type: YTN; PAM sequence: TTC
ttcaatgagttaaaaagtag

SEQ ID NO: 82139 - DNA, 20 bp, Artificial Sequence
  Description of Artificial Sequence: Synthetic oligonucleotide
  Target: SCNA; (+) strand; PAM type: YTN; PAM sequence: CTT
caatgagttaaaaagtagtt

SEQ ID NO: 82140 - DNA, 20 bp, Artificial Sequence
  Description of Artificial Sequence: Synthetic oligonucleotide
  Target: SCNA; (+) strand; PAM type: YTN; PAM sequence: TTC
aatgagttaaaaagtagttg

SEQ ID NO: 82141 - DNA, 20 bp, Artificial Sequence
  Description of Artificial Sequence: Synthetic oligonucleotide
  Target: SCNA; (+) strand; PAM type: YTN; PAM sequence: TTA
aaaagtagttgttaaaagta

SEQ ID NO: 82142 - DNA, 20 bp, Artificial Sequence
  Description of Artificial Sequence: Synthetic oligonucleotide
  Target: SCNA; (+) strand; PAM type: YTN; PAM sequence: TTG
ttaaaagtatattcttataa

SEQ ID NO: 82143 - DNA, 20 bp, Artificial Sequence
  Description of Artificial Sequence: Synthetic oligonucleotide
  Target: SCNA; (+) strand; PAM type: YTN; PAM sequence: TTA
aaagtatattcttataaagg

SEQ ID NO: 82144 - DNA, 20 bp, Artificial Sequence
  Description of Artificial Sequence: Synthetic oligonucleotide
  Target: SCNA; (+) strand; PAM type: YTN; PAM sequence: TTC
ttataaaggaatgagattac

SEQ ID NO: 82145 - DNA, 20 bp, Artificial Sequence
  Description of Artificial Sequence: Synthetic oligonucleotide
  Target: SCNA; (+) strand; PAM type: YTN; PAM sequence: CTT
ataaaggaatgagattactt

SEQ ID NO: 82146 - DNA, 20 bp, Artificial Sequence
  Description of Artificial Sequence: Synthetic oligonucleotide
  Target: SCNA; (+) strand; PAM type: YTN; PAM sequence: TTA
taaaggaatgagattacttt

SEQ ID NO: 82147 - DNA, 20 bp, Artificial Sequence
  Description of Artificial Sequence: Synthetic oligonucleotide
  Target: SCNA; (+) strand; PAM type: YTN; PAM sequence: TTA
cttttcttatgaggcttcta

SEQ ID NO: 82148 - DNA, 20 bp, Artificial Sequence
  Description of Artificial Sequence: Synthetic oligonucleotide
  Target: SCNA; (+) strand; PAM type: YTN; PAM sequence: CTT
ttcttatgaggcttctacca

SEQ ID NO: 82149 - DNA, 20 bp, Artificial Sequence
  Description of Artificial Sequence: Synthetic oligonucleotide
  Target: SCNA; (+) strand; PAM type: YTN; PAM sequence: TTT
tcttatgaggcttctaccaa

SEQ ID NO: 82150 - DNA, 20 bp, Artificial Sequence
  Description of Artificial Sequence: Synthetic oligonucleotide
  Target: SCNA; (+) strand; PAM type: YTN; PAM sequence: TTT
cttatgaggcttctaccaaa

SEQ ID NO: 82151 - DNA, 20 bp, Artificial Sequence
  Description of Artificial Sequence: Synthetic oligonucleotide
  Target: SCNA; (+) strand; PAM type: YTN; PAM sequence: TTC
ttatgaggcttctaccaaac

SEQ ID NO: 82152 - DNA, 20 bp, Artificial Sequence
  Description of Artificial Sequence: Synthetic oligonucleotide
  Target: SCNA; (+) strand; PAM type: YTN; PAM sequence: CTT
atgaggcttctaccaaacat

SEQ ID NO: 82153 - DNA, 20 bp, Artificial Sequence
  Description of Artificial Sequence: Synthetic oligonucleotide
  Target: SCNA; (+) strand; PAM type: YTN; PAM sequence: TTA
tgaggcttctaccaaacatc

SEQ ID NO: 82154 - DNA, 20 bp, Artificial Sequence
  Description of Artificial Sequence: Synthetic oligonucleotide
  Target: SCNA; (+) strand; PAM type: YTN; PAM sequence: CTT
ctaccaaacatcttcagcca

SEQ ID NO: 82155 - DNA, 20 bp, Artificial Sequence
  Description of Artificial Sequence: Synthetic oligonucleotide
  Target: SCNA; (+) strand; PAM type: YTN; PAM sequence: TTC
taccaaacatcttcagccat

SEQ ID NO: 82156 - DNA, 20 bp, Artificial Sequence
  Description of Artificial Sequence: Synthetic oligonucleotide
  Target: SCNA; (+) strand; PAM type: YTN; PAM sequence: CTA
ccaaacatcttcagccataa

SEQ ID NO: 82157 - DNA, 20 bp, Artificial Sequence
  Description of Artificial Sequence: Synthetic oligonucleotide
  Target: SCNA; (+) strand; PAM type: YTN; PAM sequence: CTT
cagccataagtgaaattata

SEQ ID NO: 82158 - DNA, 20 bp, Artificial Sequence
  Description of Artificial Sequence: Synthetic oligonucleotide
  Target: SCNA; (+) strand; PAM type: YTN; PAM sequence: TTC
agccataagtgaaattataa

SEQ ID NO: 82159 - DNA, 20 bp, Artificial Sequence
  Description of Artificial Sequence: Synthetic oligonucleotide
  Target: SCNA; (+) strand; PAM type: YTN; PAM sequence: TTA
taaaatggtctttggtcgcc

SEQ ID NO: 82160 - DNA, 20 bp, Artificial Sequence
  Description of Artificial Sequence: Synthetic oligonucleotide
  Target: SCNA; (+) strand; PAM type: YTN; PAM sequence: CTT
tggtcgcctccaatctttca

SEQ ID NO: 82161 - DNA, 20 bp, Artificial Sequence
  Description of Artificial Sequence: Synthetic oligonucleotide
  Target: SCNA; (+) strand; PAM type: YTN; PAM sequence: TTT
ggtcgcctccaatctttcaa

SEQ ID NO: 82162 - DNA, 20 bp, Artificial Sequence
  Description of Artificial Sequence: Synthetic oligonucleotide
  Target: SCNA; (+) strand; PAM type: YTN; PAM sequence: TTG
gtcgcctccaatctttcaaa

SEQ ID NO: 82163 - DNA, 20 bp, Artificial Sequence
  Description of Artificial Sequence: Synthetic oligonucleotide
  Target: SCNA; (+) strand; PAM type: YTN; PAM sequence: CTC
caatctttcaaactagttat

SEQ ID NO: 82164 - DNA, 20 bp, Artificial Sequence
  Description of Artificial Sequence: Synthetic oligonucleotide
  Target: SCNA; (+) strand; PAM type: YTN; PAM sequence: CTT
tcaaactagttatgtaatga

SEQ ID NO: 82165 - DNA, 20 bp, Artificial Sequence
  Description of Artificial Sequence: Synthetic oligonucleotide
  Target: SCNA; (+) strand; PAM type: YTN; PAM sequence: TTT
caaactagttatgtaatgaa

SEQ ID NO: 82166 - DNA, 20 bp, Artificial Sequence
  Description of Artificial Sequence: Synthetic oligonucleotide
  Target: SCNA; (+) strand; PAM type: YTN; PAM sequence: TTC
aaactagttatgtaatgaag

SEQ ID NO: 82167 - DNA, 20 bp, Artificial Sequence
  Description of Artificial Sequence: Synthetic oligonucleotide
  Target: SCNA; (+) strand; PAM type: YTN; PAM sequence: CTA
gttatgtaatgaaggataaa

SEQ ID NO: 82168 - DNA, 20 bp, Artificial Sequence
  Description of Artificial Sequence: Synthetic oligonucleotide
  Target: SCNA; (+) strand; PAM type: YTN; PAM sequence: TTA
tgtaatgaaggataaaagaa

SEQ ID NO: 82169 - DNA, 20 bp, Artificial Sequence
  Description of Artificial Sequence: Synthetic oligonucleotide
  Target: SCNA; (+) strand; PAM type: YTN; PAM sequence: TTG
gcaaagtaattattccgttg

SEQ ID NO: 82170 - DNA, 20 bp, Artificial Sequence
  Description of Artificial Sequence: Synthetic oligonucleotide
  Target: SCNA; (+) strand; PAM type: YTN; PAM sequence: TTA
ttccgttggagagtttattt

SEQ ID NO: 82171 - DNA, 20 bp, Artificial Sequence
  Description of Artificial Sequence: Synthetic oligonucleotide
  Target: SCNA; (+) strand; PAM type: YTN; PAM sequence: TTC
cgttggagagtttatttgat

SEQ ID NO: 82172 - DNA, 20 bp, Artificial Sequence
  Description of Artificial Sequence: Synthetic oligonucleotide
  Target: SCNA; (+) strand; PAM type: YTN; PAM sequence: TTG
gagagtttatttgataataa

SEQ ID NO: 82173 - DNA, 20 bp, Artificial Sequence
  Description of Artificial Sequence: Synthetic oligonucleotide
  Target: SCNA; (+) strand; PAM type: YTN; PAM sequence: TTT
atttgataataataaccatg

SEQ ID NO: 82174 - DNA, 20 bp, Artificial Sequence
  Description of Artificial Sequence: Synthetic oligonucleotide
  Target: SCNA; (+) strand; PAM type: YTN; PAM sequence: TTA
tttgataataataaccatgg

SEQ ID NO: 82175 - DNA, 20 bp, Artificial Sequence
  Description of Artificial Sequence: Synthetic oligonucleotide
  Target: SCNA; (+) strand; PAM type: YTN; PAM sequence: TTT
gataataataaccatggttc

SEQ ID NO: 82176 - DNA, 20 bp, Artificial Sequence
  Description of Artificial Sequence: Synthetic oligonucleotide
  Target: SCNA; (+) strand; PAM type: YTN; PAM sequence: TTG
ataataataaccatggttcc

SEQ ID NO: 82177 - DNA, 20 bp, Artificial Sequence
  Description of Artificial Sequence: Synthetic oligonucleotide
  Target: SCNA; (+) strand; PAM type: YTN; PAM sequence: TTC
ctatatataaaagtgtgctc

SEQ ID NO: 82178 - DNA, 20 bp, Artificial Sequence
  Description of Artificial Sequence: Synthetic oligonucleotide
  Target: SCNA; (+) strand; PAM type: YTN; PAM sequence: CTA
tatataaaagtgtgctcaat

SEQ ID NO: 82179 - DNA, 20 bp, Artificial Sequence
  Description of Artificial Sequence: Synthetic oligonucleotide
  Target: SCNA; (+) strand; PAM type: YTN; PAM sequence: CTC
aattattcatatgtcctgtc

SEQ ID NO: 82180 - DNA, 20 bp, Artificial Sequence
  Description of Artificial Sequence: Synthetic oligonucleotide
  Target: SCNA; (+) strand; PAM type: YTN; PAM sequence: TTA
ttcatatgtcctgtcttatt

SEQ ID NO: 82181 - DNA, 20 bp, Artificial Sequence
  Description of Artificial Sequence: Synthetic oligonucleotide
  Target: SCNA; (+) strand; PAM type: YTN; PAM sequence: TTC
atatgtcctgtcttattatg

SEQ ID NO: 82182 - DNA, 20 bp, Artificial Sequence
  Description of Artificial Sequence: Synthetic oligonucleotide
  Target: SCNA; (+) strand; PAM type: YTN; PAM sequence: CTG
tcttattatgacattcccac

SEQ ID NO: 82183 - DNA, 20 bp, Artificial Sequence
  Description of Artificial Sequence: Synthetic oligonucleotide
  Target: SCNA; (+) strand; PAM type: YTN; PAM sequence: CTT
attatgacattcccacaaaa

SEQ ID NO: 82184 - DNA, 20 bp, Artificial Sequence
  Description of Artificial Sequence: Synthetic oligonucleotide
  Target: SCNA; (+) strand; PAM type: YTN; PAM sequence: TTA
ttatgacattcccacaaaaa

SEQ ID NO: 82185 - DNA, 20 bp, Artificial Sequence
  Description of Artificial Sequence: Synthetic oligonucleotide
  Target: SCNA; (+) strand; PAM type: YTN; PAM sequence: TTA
tgacattcccacaaaaactg

SEQ ID NO: 82186 - DNA, 20 bp, Artificial Sequence
  Description of Artificial Sequence: Synthetic oligonucleotide
  Target: SCNA; (+) strand; PAM type: YTN; PAM sequence: TTC
ccacaaaaactgcaaggtag

SEQ ID NO: 82187 - DNA, 20 bp, Artificial Sequence
  Description of Artificial Sequence: Synthetic oligonucleotide
  Target: SCNA; (+) strand; PAM type: YTN; PAM sequence: CTG
caaggtagttgcagttttct

SEQ ID NO: 82188 - DNA, 20 bp, Artificial Sequence
  Description of Artificial Sequence: Synthetic oligonucleotide
  Target: SCNA; (+) strand; PAM type: YTN; PAM sequence: TTG
cagttttctaaatcatattt

SEQ ID NO: 82189 - DNA, 20 bp, Artificial Sequence
  Description of Artificial Sequence: Synthetic oligonucleotide
  Target: SCNA; (+) strand; PAM type: YTN; PAM sequence: TTT
tctaaatcatattttttact

SEQ ID NO: 82190 - DNA, 20 bp, Artificial Sequence
  Description of Artificial Sequence: Synthetic oligonucleotide
  Target: SCNA; (+) strand; PAM type: YTN; PAM sequence: TTT
ctaaatcatattttttacta

SEQ ID NO: 82191 - DNA, 20 bp, Artificial Sequence
  Description of Artificial Sequence: Synthetic oligonucleotide
  Target: SCNA; (+) strand; PAM type: YTN; PAM sequence: TTC
taaatcatattttttactaa

SEQ ID NO: 82192 - DNA, 20 bp, Artificial Sequence
  Description of Artificial Sequence: Synthetic oligonucleotide
  Target: SCNA; (+) strand; PAM type: YTN; PAM sequence: CTA
aatcatattttttactaatc

SEQ ID NO: 82193 - DNA, 20 bp, Artificial Sequence
  Description of Artificial Sequence: Synthetic oligonucleotide
  Target: SCNA; (+) strand; PAM type: YTN; PAM sequence: TTT
tttactaatcagggaagtga

SEQ ID NO: 82194 - DNA, 20 bp, Artificial Sequence
  Description of Artificial Sequence: Synthetic oligonucleotide
  Target: SCNA; (+) strand; PAM type: YTN; PAM sequence: TTT
ttactaatcagggaagtgat

SEQ ID NO: 82195 - DNA, 20 bp, Artificial Sequence
  Description of Artificial Sequence: Synthetic oligonucleotide
  Target: SCNA; (+) strand; PAM type: YTN; PAM sequence: TTT
tactaatcagggaagtgatg

SEQ ID NO: 82196 - DNA, 20 bp, Artificial Sequence
  Description of Artificial Sequence: Synthetic oligonucleotide
  Target: SCNA; (+) strand; PAM type: YTN; PAM sequence: TTT
actaatcagggaagtgatgc

SEQ ID NO: 82197 - DNA, 20 bp, Artificial Sequence
  Description of Artificial Sequence: Synthetic oligonucleotide
  Target: SCNA; (+) strand; PAM type: YTN; PAM sequence: TTA
ctaatcagggaagtgatgct

SEQ ID NO: 82198 - DNA, 20 bp, Artificial Sequence
  Description of Artificial Sequence: Synthetic oligonucleotide
  Target: SCNA; (+) strand; PAM type: YTN; PAM sequence: CTA
atcagggaagtgatgctcag

SEQ ID NO: 82199 - DNA, 20 bp, Artificial Sequence
  Description of Artificial Sequence: Synthetic oligonucleotide
  Target: SCNA; (+) strand; PAM type: YTN; PAM sequence: CTC
agagatgttaagtacgcttc

SEQ ID NO: 82200 - DNA, 20 bp, Artificial Sequence
  Description of Artificial Sequence: Synthetic oligonucleotide
  Target: SCNA; (+) strand; PAM type: YTN; PAM sequence: TTA
agtacgcttccccaagaccc

SEQ ID NO: 82201 - DNA, 20 bp, Artificial Sequence
  Description of Artificial Sequence: Synthetic oligonucleotide
  Target: SCNA; (+) strand; PAM type: YTN; PAM sequence: CTT
ccccaagaccctaaaggtga

SEQ ID NO: 82202 - DNA, 20 bp, Artificial Sequence
  Description of Artificial Sequence: Synthetic oligonucleotide
  Target: SCNA; (+) strand; PAM type: YTN; PAM sequence: TTC
cccaagaccctaaaggtgat

SEQ ID NO: 82203 - DNA, 20 bp, Artificial Sequence
  Description of Artificial Sequence: Synthetic oligonucleotide
  Target: SCNA; (+) strand; PAM type: YTN; PAM sequence: CTA
aaggtgataagtgatgtagt

SEQ ID NO: 82204 - DNA, 20 bp, Artificial Sequence
  Description of Artificial Sequence: Synthetic oligonucleotide
  Target: SCNA; (+) strand; PAM type: YTN; PAM sequence: CTC
aactaaaactttggtttgtg

SEQ ID NO: 82205 - DNA, 20 bp, Artificial Sequence
  Description of Artificial Sequence: Synthetic oligonucleotide
  Target: SCNA; (+) strand; PAM type: YTN; PAM sequence: CTA
aaactttggtttgtgtgatt

SEQ ID NO: 82206 - DNA, 20 bp, Artificial Sequence
  Description of Artificial Sequence: Synthetic oligonucleotide
  Target: SCNA; (+) strand; PAM type: YTN; PAM sequence: CTT
tggtttgtgtgattagtgca

SEQ ID NO: 82207 - DNA, 20 bp, Artificial Sequence
  Description of Artificial Sequence: Synthetic oligonucleotide
  Target: SCNA; (+) strand; PAM type: YTN; PAM sequence: TTT
ggtttgtgtgattagtgcat

SEQ ID NO: 82208 - DNA, 20 bp, Artificial Sequence
  Description of Artificial Sequence: Synthetic oligonucleotide
  Target: SCNA; (+) strand; PAM type: YTN; PAM sequence: TTG
gtttgtgtgattagtgcatg

SEQ ID NO: 82209 - DNA, 20 bp, Artificial Sequence
  Description of Artificial Sequence: Synthetic oligonucleotide
  Target: SCNA; (+) strand; PAM type: YTN; PAM sequence: TTT
gtgtgattagtgcatgttct

SEQ ID NO: 82210 - DNA, 20 bp, Artificial Sequence
  Description of Artificial Sequence: Synthetic oligonucleotide
  Target: SCNA; (+) strand; PAM type: YTN; PAM sequence: TTG
tgtgattagtgcatgttctt

SEQ ID NO: 82211 - DNA, 20 bp, Artificial Sequence
  Description of Artificial Sequence: Synthetic oligonucleotide
  Target: SCNA; (+) strand; PAM type: YTN; PAM sequence: TTA
gtgcatgttctttccactct

SEQ ID NO: 82212 - DNA, 20 bp, Artificial Sequence
  Description of Artificial Sequence: Synthetic oligonucleotide
  Target: SCNA; (+) strand; PAM type: YTN; PAM sequence: TTC
tttccactctatcagtagtc

SEQ ID NO: 82213 - DNA, 20 bp, Artificial Sequence
  Description of Artificial Sequence: Synthetic oligonucleotide
  Target: SCNA; (+) strand; PAM type: YTN; PAM sequence: CTT
tccactctatcagtagtcag

SEQ ID NO: 82214 - DNA, 20 bp, Artificial Sequence
  Description of Artificial Sequence: Synthetic oligonucleotide
  Target: SCNA; (+) strand; PAM type: YTN; PAM sequence: TTT
ccactctatcagtagtcagc

SEQ ID NO: 82215 - DNA, 20 bp, Artificial Sequence
  Description of Artificial Sequence: Synthetic oligonucleotide
  Target: SCNA; (+) strand; PAM type: YTN; PAM sequence: TTC
cactctatcagtagtcagca

SEQ ID NO: 82216 - DNA, 20 bp, Artificial Sequence
  Description of Artificial Sequence: Synthetic oligonucleotide
  Target: SCNA; (+) strand; PAM type: YTN; PAM sequence: CTC
tatcagtagtcagcaagcta

SEQ ID NO: 82217 - DNA, 20 bp, Artificial Sequence
  Description of Artificial Sequence: Synthetic oligonucleotide
  Target: SCNA; (+) strand; PAM type: YTN; PAM sequence: CTA
tcagtagtcagcaagctaca

SEQ ID NO: 82218 - DNA, 20 bp, Artificial Sequence
  Description of Artificial Sequence: Synthetic oligonucleotide
  Target: SCNA; (+) strand; PAM type: YTN; PAM sequence: CTA
caacatacaagacaattcca

SEQ ID NO: 82219 - DNA, 20 bp, Artificial Sequence
  Description of Artificial Sequence: Synthetic oligonucleotide
  Target: SCNA; (+) strand; PAM type: YTN; PAM sequence: TTC
cagcccaccacctgttttga

SEQ ID NO: 82220 - DNA, 20 bp, Artificial Sequence
  Description of Artificial Sequence: Synthetic oligonucleotide
  Target: SCNA; (+) strand; PAM type: YTN; PAM sequence: CTG
ttttgataaatgaagtttta

SEQ ID NO: 82221 - DNA, 20 bp, Artificial Sequence
  Description of Artificial Sequence: Synthetic oligonucleotide
  Target: SCNA; (+) strand; PAM type: YTN; PAM sequence: TTT
tgataaatgaagttttattg

SEQ ID NO: 82222 - DNA, 20 bp, Artificial Sequence
  Description of Artificial Sequence: Synthetic oligonucleotide
  Target: SCNA; (+) strand; PAM type: YTN; PAM sequence: TTT
gataaatgaagttttattgg

SEQ ID NO: 82223 - DNA, 20 bp, Artificial Sequence
  Description of Artificial Sequence: Synthetic oligonucleotide
  Target: SCNA; (+) strand; PAM type: YTN; PAM sequence: TTG
ataaatgaagttttattggg

SEQ ID NO: 82224 - DNA, 20 bp, Artificial Sequence
  Description of Artificial Sequence: Synthetic oligonucleotide
  Target: SCNA; (+) strand; PAM type: YTN; PAM sequence: TTT
tattgggacacagccacact

SEQ ID NO: 82225 - DNA, 20 bp, Artificial Sequence
  Description of Artificial Sequence: Synthetic oligonucleotide
  Target: SCNA; (+) strand; PAM type: YTN; PAM sequence: TTT
attgggacacagccacacta

SEQ ID NO: 82226 - DNA, 20 bp, Artificial Sequence
  Description of Artificial Sequence: Synthetic oligonucleotide
  Target: SCNA; (+) strand; PAM type: YTN; PAM sequence: TTA
ttgggacacagccacactag

SEQ ID NO: 82227 - DNA, 20 bp, Artificial Sequence
  Description of Artificial Sequence: Synthetic oligonucleotide
  Target: SCNA; (+) strand; PAM type: YTN; PAM sequence: TTG
ggacacagccacactagtta

SEQ ID NO: 82228 - DNA, 20 bp, Artificial Sequence
  Description of Artificial Sequence: Synthetic oligonucleotide
  Target: SCNA; (+) strand; PAM type: YTN; PAM sequence: CTA
gttattgtttatgactacct

SEQ ID NO: 82229 - DNA, 20 bp, Artificial Sequence
  Description of Artificial Sequence: Synthetic oligonucleotide
  Target: SCNA; (+) strand; PAM type: YTN; PAM sequence: TTA
ttgtttatgactaccttcac

SEQ ID NO: 82230 - DNA, 20 bp, Artificial Sequence
  Description of Artificial Sequence: Synthetic oligonucleotide
  Target: SCNA; (+) strand; PAM type: YTN; PAM sequence: TTG
tttatgactaccttcacact

SEQ ID NO: 82231 - DNA, 20 bp, Artificial Sequence
  Description of Artificial Sequence: Synthetic oligonucleotide
  Target: SCNA; (+) strand; PAM type: YTN; PAM sequence: TTT
atgactaccttcacacttca

SEQ ID NO: 82232 - DNA, 20 bp, Artificial Sequence
  Description of Artificial Sequence: Synthetic oligonucleotide
  Target: SCNA; (+) strand; PAM type: YTN; PAM sequence: TTA
tgactaccttcacacttcaa

SEQ ID NO: 82233 - DNA, 20 bp, Artificial Sequence
  Description of Artificial Sequence: Synthetic oligonucleotide
  Target: SCNA; (+) strand; PAM type: YTN; PAM sequence: CTA
ccttcacacttcaacagcag

SEQ ID NO: 82234 - DNA, 20 bp, Artificial Sequence
  Description of Artificial Sequence: Synthetic oligonucleotide
  Target: SCNA; (+) strand; PAM type: YTN; PAM sequence: CTT
cacacttcaacagcagaatt

SEQ ID NO: 82235 - DNA, 20 bp, Artificial Sequence
  Description of Artificial Sequence: Synthetic oligonucleotide
  Target: SCNA; (+) strand; PAM type: YTN; PAM sequence: TTC
acacttcaacagcagaattg

SEQ ID NO: 82236 - DNA, 20 bp, Artificial Sequence
  Description of Artificial Sequence: Synthetic oligonucleotide
  Target: SCNA; (+) strand; PAM type: YTN; PAM sequence: CTT
caacagcagaattgagacat

SEQ ID NO: 82237 - DNA, 20 bp, Artificial Sequence
  Description of Artificial Sequence: Synthetic oligonucleotide
  Target: SCNA; (+) strand; PAM type: YTN; PAM sequence: TTC
aacagcagaattgagacata

SEQ ID NO: 82238 - DNA, 20 bp, Artificial Sequence
  Description of Artificial Sequence: Synthetic oligonucleotide
  Target: SCNA; (+) strand; PAM type: YTN; PAM sequence: TTG
agacatagatttttttttct

SEQ ID NO: 82239 - DNA, 20 bp, Artificial Sequence
  Description of Artificial Sequence: Synthetic oligonucleotide
  Target: SCNA; (+) strand; PAM type: YTN; PAM sequence: TTT
ttttttcttttttttagaca

SEQ ID NO: 82240 - DNA, 20 bp, Artificial Sequence
  Description of Artificial Sequence: Synthetic oligonucleotide
  Target: SCNA; (+) strand; PAM type: YTN; PAM sequence: TTT
tttttcttttttttagacag

SEQ ID NO: 82241 - DNA, 20 bp, Artificial Sequence
  Description of Artificial Sequence: Synthetic oligonucleotide
  Target: SCNA; (+) strand; PAM type: YTN; PAM sequence: TTT
ttttcttttttttagacagg

SEQ ID NO: 82242 - DNA, 20 bp, Artificial Sequence
  Description of Artificial Sequence: Synthetic oligonucleotide
  Target: SCNA; (+) strand; PAM type: YTN; PAM sequence: TTT
tttcttttttttagacaggg

SEQ ID NO: 82243 - DNA, 20 bp, Artificial Sequence
  Description of Artificial Sequence: Synthetic oligonucleotide
  Target: SCNA; (+) strand; PAM type: YTN; PAM sequence: TTT
ttcttttttttagacagggt

SEQ ID NO: 82244 - DNA, 20 bp, Artificial Sequence
  Description of Artificial Sequence: Synthetic oligonucleotide
  Target: SCNA; (+) strand; PAM type: YTN; PAM sequence: TTT
tcttttttttagacagggta

SEQ ID NO: 82245 - DNA, 20 bp, Artificial Sequence
  Description of Artificial Sequence: Synthetic oligonucleotide
  Target: SCNA; (+) strand; PAM type: YTN; PAM sequence: TTT
cttttttttagacagggtat

SEQ ID NO: 82246 - DNA, 20 bp, Artificial Sequence
  Description of Artificial Sequence: Synthetic oligonucleotide
  Target: SCNA; (+) strand; PAM type: YTN; PAM sequence: TTC
ttttttttagacagggtatc

SEQ ID NO: 82247 - DNA, 20 bp, Artificial Sequence
  Description of Artificial Sequence: Synthetic oligonucleotide
  Target: SCNA; (+) strand; PAM type: YTN; PAM sequence: CTT
ttttttagacagggtatcac

SEQ ID NO: 82248 - DNA, 20 bp, Artificial Sequence
  Description of Artificial Sequence: Synthetic oligonucleotide
  Target: SCNA; (+) strand; PAM type: YTN; PAM sequence: TTT
tttttagacagggtatcact

SEQ ID NO: 82249 - DNA, 20 bp, Artificial Sequence
  Description of Artificial Sequence: Synthetic oligonucleotide
  Target: SCNA; (+) strand; PAM type: YTN; PAM sequence: TTT
ttttagacagggtatcactc

SEQ ID NO: 82250 - DNA, 20 bp, Artificial Sequence
  Description of Artificial Sequence: Synthetic oligonucleotide
  Target: SCNA; (+) strand; PAM type: YTN; PAM sequence: TTT
tttagacagggtatcactct

SEQ ID NO: 82251 - DNA, 20 bp, Artificial Sequence
  Description of Artificial Sequence: Synthetic oligonucleotide
  Target: SCNA; (+) strand; PAM type: YTN; PAM sequence: TTT
ttagacagggtatcactctg

SEQ ID NO: 82252 - DNA, 20 bp, Artificial Sequence
  Description of Artificial Sequence: Synthetic oligonucleotide
  Target: SCNA; (+) strand; PAM type: YTN; PAM sequence: TTT
tagacagggtatcactctgc

SEQ ID NO: 82253 - DNA, 20 bp, Artificial Sequence
  Description of Artificial Sequence: Synthetic oligonucleotide
  Target: SCNA; (+) strand; PAM type: YTN; PAM sequence: TTT
agacagggtatcactctgcc

SEQ ID NO: 82254 - DNA, 20 bp, Artificial Sequence
  Description of Artificial Sequence: Synthetic oligonucleotide
  Target: SCNA; (+) strand; PAM type: YTN; PAM sequence: TTA
gacagggtatcactctgcca

SEQ ID NO: 82255 - DNA, 20 bp, Artificial Sequence
  Description of Artificial Sequence: Synthetic oligonucleotide
  Target: SCNA; (+) strand; PAM type: YTN; PAM sequence: CTC
tgccacccaggctggagtgc

SEQ ID NO: 82256 - DNA, 20 bp, Artificial Sequence
  Description of Artificial Sequence: Synthetic oligonucleotide
  Target: SCNA; (+) strand; PAM type: YTN; PAM sequence: CTG
ccacccaggctggagtgcag

SEQ ID NO: 82257 - DNA, 20 bp, Artificial Sequence
  Description of Artificial Sequence: Synthetic oligonucleotide
  Target: SCNA; (+) strand; PAM type: YTN; PAM sequence: CTG
gagtgcagtggctcgatctc

SEQ ID NO: 82258 - DNA, 20 bp, Artificial Sequence
  Description of Artificial Sequence: Synthetic oligonucleotide
  Target: SCNA; (+) strand; PAM type: YTN; PAM sequence: CTC
gatctcagctcactgcaacc

SEQ ID NO: 82259 - DNA, 20 bp, Artificial Sequence
  Description of Artificial Sequence: Synthetic oligonucleotide
  Target: SCNA; (+) strand; PAM type: YTN; PAM sequence: CTC
agctcactgcaacctctgca

SEQ ID NO: 82260 - DNA, 20 bp, Artificial Sequence
  Description of Artificial Sequence: Synthetic oligonucleotide
  Target: SCNA; (+) strand; PAM type: YTN; PAM sequence: CTC
actgcaacctctgcagtgag

SEQ ID NO: 82261 - DNA, 20 bp, Artificial Sequence
  Description of Artificial Sequence: Synthetic oligonucleotide
  Target: SCNA; (+) strand; PAM type: YTN; PAM sequence: CTG
caacctctgcagtgagctgt

SEQ ID NO: 82262 - DNA, 20 bp, Artificial Sequence
  Description of Artificial Sequence: Synthetic oligonucleotide
  Target: SCNA; (+) strand; PAM type: YTN; PAM sequence: CTC
tgcagtgagctgtatggctc

SEQ ID NO: 82263 - DNA, 20 bp, Artificial Sequence
  Description of Artificial Sequence: Synthetic oligonucleotide
  Target: SCNA; (+) strand; PAM type: YTN; PAM sequence: CTG
cagtgagctgtatggctcaa

SEQ ID NO: 82264 - DNA, 20 bp, Artificial Sequence
  Description of Artificial Sequence: Synthetic oligonucleotide
  Target: SCNA; (+) strand; PAM type: YTN; PAM sequence: CTG
tatggctcaagccatcctcc

SEQ ID NO: 82265 - DNA, 20 bp, Artificial Sequence
  Description of Artificial Sequence: Synthetic oligonucleotide
  Target: SCNA; (+) strand; PAM type: YTN; PAM sequence: CTC
aagccatcctcctacctcag

SEQ ID NO: 82266 - DNA, 20 bp, Artificial Sequence
  Description of Artificial Sequence: Synthetic oligonucleotide
  Target: SCNA; (+) strand; PAM type: YTN; PAM sequence: CTC
ctacctcagcctcctgggta

SEQ ID NO: 82267 - DNA, 20 bp, Artificial Sequence
  Description of Artificial Sequence: Synthetic oligonucleotide
  Target: SCNA; (+) strand; PAM type: YTN; PAM sequence: CTA
cctcagcctcctgggtagct

SEQ ID NO: 82268 - DNA, 20 bp, Artificial Sequence
  Description of Artificial Sequence: Synthetic oligonucleotide
  Target: SCNA; (+) strand; PAM type: YTN; PAM sequence: CTC
agcctcctgggtagctggca

SEQ ID NO: 82269 - DNA, 20 bp, Artificial Sequence
  Description of Artificial Sequence: Synthetic oligonucleotide
  Target: SCNA; (+) strand; PAM type: YTN; PAM sequence: CTC
ctgggtagctggcaatacac

SEQ ID NO: 82270 - DNA, 20 bp, Artificial Sequence
  Description of Artificial Sequence: Synthetic oligonucleotide
  Target: SCNA; (+) strand; PAM type: YTN; PAM sequence: CTG
ggtagctggcaatacacatg

SEQ ID NO: 82271 - DNA, 20 bp, Artificial Sequence
  Description of Artificial Sequence: Synthetic oligonucleotide
  Target: SCNA; (+) strand; PAM type: YTN; PAM sequence: CTG
gcaatacacatgcatgctac

SEQ ID NO: 82272 - DNA, 20 bp, Artificial Sequence
  Description of Artificial Sequence: Synthetic oligonucleotide
  Target: SCNA; (+) strand; PAM type: YTN; PAM sequence: CTA
ccatacccggctaatttttg

SEQ ID NO: 82273 - DNA, 20 bp, Artificial Sequence
  Description of Artificial Sequence: Synthetic oligonucleotide
  Target: SCNA; (+) strand; PAM type: YTN; PAM sequence: CTA
atttttgcgttgtttgtaga

SEQ ID NO: 82274 - DNA, 20 bp, Artificial Sequence
  Description of Artificial Sequence: Synthetic oligonucleotide
  Target: SCNA; (+) strand; PAM type: YTN; PAM sequence: TTT
ttgcgttgtttgtagacaca

SEQ ID NO: 82275 - DNA, 20 bp, Artificial Sequence
  Description of Artificial Sequence: Synthetic oligonucleotide
  Target: SCNA; (+) strand; PAM type: YTN; PAM sequence: TTT
tgcgttgtttgtagacacag

SEQ ID NO: 82276 - DNA, 20 bp, Artificial Sequence
  Description of Artificial Sequence: Synthetic oligonucleotide
  Target: SCNA; (+) strand; PAM type: YTN; PAM sequence: TTT
gcgttgtttgtagacacagg

SEQ ID NO: 82277 - DNA, 20 bp, Artificial Sequence
  Description of Artificial Sequence: Synthetic oligonucleotide
  Target: SCNA; (+) strand; PAM type: YTN; PAM sequence: TTG
cgttgtttgtagacacaggg

SEQ ID NO: 82278 - DNA, 20 bp, Artificial Sequence
  Description of Artificial Sequence: Synthetic oligonucleotide
  Target: SCNA; (+) strand; PAM type: YTN; PAM sequence: TTG
tttgtagacacagggtttca

SEQ ID NO: 82279 - DNA, 20 bp, Artificial Sequence
  Description of Artificial Sequence: Synthetic oligonucleotide
  Target: SCNA; (+) strand; PAM type: YTN; PAM sequence: TTT
gtagacacagggtttcacca

SEQ ID NO: 82280 - DNA, 20 bp, Artificial Sequence
  Description of Artificial Sequence: Synthetic oligonucleotide
  Target: SCNA; (+) strand; PAM type: YTN; PAM sequence: TTG
tagacacagggtttcaccat

SEQ ID NO: 82281 - DNA, 20 bp, Artificial Sequence
  Description of Artificial Sequence: Synthetic oligonucleotide
  Target: SCNA; (+) strand; PAM type: YTN; PAM sequence: TTT
caccatgtggcccaggctgg

SEQ ID NO: 82282 - DNA, 20 bp, Artificial Sequence
  Description of Artificial Sequence: Synthetic oligonucleotide
  Target: SCNA; (+) strand; PAM type: YTN; PAM sequence: TTC
accatgtggcccaggctggt

SEQ ID NO: 82283 - DNA, 20 bp, Artificial Sequence
  Description of Artificial Sequence: Synthetic oligonucleotide
  Target: SCNA; (+) strand; PAM type: YTN; PAM sequence: CTG
gtctcaaacccctgggctca

SEQ ID NO: 82284 - DNA, 20 bp, Artificial Sequence
  Description of Artificial Sequence: Synthetic oligonucleotide
  Target: SCNA; (+) strand; PAM type: YTN; PAM sequence: CTC
aaacccctgggctcaagtga

SEQ ID NO: 82285 - DNA, 20 bp, Artificial Sequence
  Description of Artificial Sequence: Synthetic oligonucleotide
  Target: SCNA; (+) strand; PAM type: YTN; PAM sequence: CTG
ggctcaagtgatccaccagc

SEQ ID NO: 82286 - DNA, 20 bp, Artificial Sequence
  Description of Artificial Sequence: Synthetic oligonucleotide
  Target: SCNA; (+) strand; PAM type: YTN; PAM sequence: CTC
aagtgatccaccagcctcgg

SEQ ID NO: 82287 - DNA, 20 bp, Artificial Sequence
  Description of Artificial Sequence: Synthetic oligonucleotide
  Target: SCNA; (+) strand; PAM type: YTN; PAM sequence: CTC
gggctctcaaagtgctggga

SEQ ID NO: 82288 - DNA, 20 bp, Artificial Sequence
  Description of Artificial Sequence: Synthetic oligonucleotide
  Target: SCNA; (+) strand; PAM type: YTN; PAM sequence: CTC
tcaaagtgctgggattaaag

SEQ ID NO: 82289 - DNA, 20 bp, Artificial Sequence
  Description of Artificial Sequence: Synthetic oligonucleotide
  Target: SCNA; (+) strand; PAM type: YTN; PAM sequence: CTC
aaagtgctgggattaaagac

SEQ ID NO: 82290 - DNA, 20 bp, Artificial Sequence
  Description of Artificial Sequence: Synthetic oligonucleotide
  Target: SCNA; (+) strand; PAM type: YTN; PAM sequence: CTG
ggattaaagacctgagccac

SEQ ID NO: 82291 - DNA, 20 bp, Artificial Sequence
  Description of Artificial Sequence: Synthetic oligonucleotide
  Target: SCNA; (+) strand; PAM type: YTN; PAM sequence: TTA
aagacctgagccacggcacc

SEQ ID NO: 82292 - DNA, 20 bp, Artificial Sequence
  Description of Artificial Sequence: Synthetic oligonucleotide
  Target: SCNA; (+) strand; PAM type: YTN; PAM sequence: CTG
agccacggcacctggccaag

SEQ ID NO: 82293 - DNA, 20 bp, Artificial Sequence
  Description of Artificial Sequence: Synthetic oligonucleotide
  Target: SCNA; (+) strand; PAM type: YTN; PAM sequence: CTG
gccaagacatagatctcatg

SEQ ID NO: 82294 - DNA, 20 bp, Artificial Sequence
  Description of Artificial Sequence: Synthetic oligonucleotide
  Target: SCNA; (+) strand; PAM type: YTN; PAM sequence: CTC
atggcttaaaatacgtgcta

SEQ ID NO: 82295 - DNA, 20 bp, Artificial Sequence
  Description of Artificial Sequence: Synthetic oligonucleotide
  Target: SCNA; (+) strand; PAM type: YTN; PAM sequence: CTT
aaaatacgtgctatctgatt

SEQ ID NO: 82296 - DNA, 20 bp, Artificial Sequence
  Description of Artificial Sequence: Synthetic oligonucleotide
  Target: SCNA; (+) strand; PAM type: YTN; PAM sequence: TTA
aaatacgtgctatctgattc

SEQ ID NO: 82297 - DNA, 20 bp, Artificial Sequence
  Description of Artificial Sequence: Synthetic oligonucleotide
  Target: SCNA; (+) strand; PAM type: YTN; PAM sequence: CTA
tctgattccttacccaaaat

SEQ ID NO: 82298 - DNA, 20 bp, Artificial Sequence
  Description of Artificial Sequence: Synthetic oligonucleotide
  Target: SCNA; (+) strand; PAM type: YTN; PAM sequence: CTG
attccttacccaaaattttg

SEQ ID NO: 82299 - DNA, 20 bp, Artificial Sequence
  Description of Artificial Sequence: Synthetic oligonucleotide
  Target: SCNA; (+) strand; PAM type: YTN; PAM sequence: TTC
cttacccaaaattttgccaa

SEQ ID NO: 82300 - DNA, 20 bp, Artificial Sequence
  Description of Artificial Sequence: Synthetic oligonucleotide
  Target: SCNA; (+) strand; PAM type: YTN; PAM sequence: CTT
acccaaaattttgccaatcc

SEQ ID NO: 82301 - DNA, 20 bp, Artificial Sequence
  Description of Artificial Sequence: Synthetic oligonucleotide
  Target: SCNA; (+) strand; PAM type: YTN; PAM sequence: TTA
cccaaaattttgccaatccc

SEQ ID NO: 82302 - DNA, 20 bp, Artificial Sequence
  Description of Artificial Sequence: Synthetic oligonucleotide
  Target: SCNA; (+) strand; PAM type: YTN; PAM sequence: TTT
tgccaatccctggactatac

SEQ ID NO: 82303 - DNA, 20 bp, Artificial Sequence
  Description of Artificial Sequence: Synthetic oligonucleotide
  Target: SCNA; (+) strand; PAM type: YTN; PAM sequence: TTT
gccaatccctggactatact

SEQ ID NO: 82304 - DNA, 20 bp, Artificial Sequence
  Description of Artificial Sequence: Synthetic oligonucleotide
  Target: SCNA; (+) strand; PAM type: YTN; PAM sequence: TTG
ccaatccctggactatacta

SEQ ID NO: 82305 - DNA, 20 bp, Artificial Sequence
  Description of Artificial Sequence: Synthetic oligonucleotide
  Target: SCNA; (+) strand; PAM type: YTN; PAM sequence: CTG
gactatactattgtgtcttc

SEQ ID NO: 82306 - DNA, 20 bp, Artificial Sequence
  Description of Artificial Sequence: Synthetic oligonucleotide
  Target: SCNA; (+) strand; PAM type: YTN; PAM sequence: CTA
tactattgtgtcttcacatg

SEQ ID NO: 82307 - DNA, 20 bp, Artificial Sequence
  Description of Artificial Sequence: Synthetic oligonucleotide
  Target: SCNA; (+) strand; PAM type: YTN; PAM sequence: CTA
ttgtgtcttcacatggtcat

SEQ ID NO: 82308 - DNA, 20 bp, Artificial Sequence
  Description of Artificial Sequence: Synthetic oligonucleotide
  Target: SCNA; (+) strand; PAM type: YTN; PAM sequence: TTG
tgtcttcacatggtcatttt

SEQ ID NO: 82309 - DNA, 20 bp, Artificial Sequence
  Description of Artificial Sequence: Synthetic oligonucleotide
  Target: SCNA; (+) strand; PAM type: YTN; PAM sequence: CTT
cacatggtcattttttatct

SEQ ID NO: 82310 - DNA, 20 bp, Artificial Sequence
  Description of Artificial Sequence: Synthetic oligonucleotide
  Target: SCNA; (+) strand; PAM type: YTN; PAM sequence: TTC
acatggtcattttttatctt

SEQ ID NO: 82311 - DNA, 20 bp, Artificial Sequence
  Description of Artificial Sequence: Synthetic oligonucleotide
  Target: SCNA; (+) strand; PAM type: YTN; PAM sequence: TTT
tttatcttaaattctgtgtg

SEQ ID NO: 82312 - DNA, 20 bp, Artificial Sequence
  Description of Artificial Sequence: Synthetic oligonucleotide
  Target: SCNA; (+) strand; PAM type: YTN; PAM sequence: TTT
ttatcttaaattctgtgtgt

SEQ ID NO: 82313 - DNA, 20 bp, Artificial Sequence
  Description of Artificial Sequence: Synthetic oligonucleotide
  Target: SCNA; (+) strand; PAM type: YTN; PAM sequence: TTT
tatcttaaattctgtgtgta

SEQ ID NO: 82314 - DNA, 20 bp, Artificial Sequence
  Description of Artificial Sequence: Synthetic oligonucleotide
  Target: SCNA; (+) strand; PAM type: YTN; PAM sequence: TTT
atcttaaattctgtgtgtaa

SEQ ID NO: 82315 - DNA, 20 bp, Artificial Sequence
  Description of Artificial Sequence: Synthetic oligonucleotide
  Target: SCNA; (+) strand; PAM type: YTN; PAM sequence: TTA
tcttaaattctgtgtgtaag

SEQ ID NO: 82316 - DNA, 20 bp, Artificial Sequence
  Description of Artificial Sequence: Synthetic oligonucleotide
  Target: SCNA; (+) strand; PAM type: YTN; PAM sequence: CTT
aaattctgtgtgtaagttca

SEQ ID NO: 82317 - DNA, 20 bp, Artificial Sequence
  Description of Artificial Sequence: Synthetic oligonucleotide
  Target: SCNA; (+) strand; PAM type: YTN; PAM sequence: TTA
aattctgtgtgtaagttcaa

SEQ ID NO: 82318 - DNA, 20 bp, Artificial Sequence
  Description of Artificial Sequence: Synthetic oligonucleotide
  Target: SCNA; (+) strand; PAM type: YTN; PAM sequence: TTC
tgtgtgtaagttcaactctc

SEQ ID NO: 82319 - DNA, 20 bp, Artificial Sequence
  Description of Artificial Sequence: Synthetic oligonucleotide
  Target: SCNA; (+) strand; PAM type: YTN; PAM sequence: CTG
tgtgtaagttcaactctcaa

SEQ ID NO: 82320 - DNA, 20 bp, Artificial Sequence
  Description of Artificial Sequence: Synthetic oligonucleotide
  Target: SCNA; (+) strand; PAM type: YTN; PAM sequence: TTC
aactctcaattagaactcag

SEQ ID NO: 82321 - DNA, 20 bp, Artificial Sequence
  Description of Artificial Sequence: Synthetic oligonucleotide
  Target: SCNA; (+) strand; PAM type: YTN; PAM sequence: CTC
tcaattagaactcagaatgt

SEQ ID NO: 82322 - DNA, 20 bp, Artificial Sequence
  Description of Artificial Sequence: Synthetic oligonucleotide
  Target: SCNA; (+) strand; PAM type: YTN; PAM sequence: CTC
aattagaactcagaatgtaa

SEQ ID NO: 82323 - DNA, 20 bp, Artificial Sequence
  Description of Artificial Sequence: Synthetic oligonucleotide
  Target: SCNA; (+) strand; PAM type: YTN; PAM sequence: TTA
gaactcagaatgtaaccaat

SEQ ID NO: 82324 - DNA, 20 bp, Artificial Sequence
  Description of Artificial Sequence: Synthetic oligonucleotide
  Target: SCNA; (+) strand; PAM type: YTN; PAM sequence: CTC
agaatgtaaccaataaaaaa

SEQ ID NO: 82325 - DNA, 20 bp, Artificial Sequence
  Description of Artificial Sequence: Synthetic oligonucleotide
  Target: SCNA; (+) strand; PAM type: YTN; PAM sequence: TTT
atagaatgtgctatgtgtta

SEQ ID NO: 82326 - DNA, 20 bp, Artificial Sequence
  Description of Artificial Sequence: Synthetic oligonucleotide
  Target: SCNA; (+) strand; PAM type: YTN; PAM sequence: TTA
tagaatgtgctatgtgttaa

SEQ ID NO: 82327 - DNA, 20 bp, Artificial Sequence
  Description of Artificial Sequence: Synthetic oligonucleotide
  Target: SCNA; (+) strand; PAM type: YTN; PAM sequence: CTA
tgtgttaaatgccatgagag

SEQ ID NO: 82328 - DNA, 20 bp, Artificial Sequence
  Description of Artificial Sequence: Synthetic oligonucleotide
  Target: SCNA; (+) strand; PAM type: YTN; PAM sequence: TTA
aatgccatgagagacattga

SEQ ID NO: 82329 - DNA, 20 bp, Artificial Sequence
  Description of Artificial Sequence: Synthetic oligonucleotide
  Target: SCNA; (+) strand; PAM type: YTN; PAM sequence: TTG
aaaatgatttcaatgaacag

SEQ ID NO: 82330 - DNA, 20 bp, Artificial Sequence
  Description of Artificial Sequence: Synthetic oligonucleotide
  Target: SCNA; (+) strand; PAM type: YTN; PAM sequence: TTT
caatgaacagttaaaaggta

SEQ ID NO: 82331 - DNA, 20 bp, Artificial Sequence
  Description of Artificial Sequence: Synthetic oligonucleotide
  Target: SCNA; (+) strand; PAM type: YTN; PAM sequence: TTC
aatgaacagttaaaaggtaa

SEQ ID NO: 82332 - DNA, 20 bp, Artificial Sequence
  Description of Artificial Sequence: Synthetic oligonucleotide
  Target: SCNA; (+) strand; PAM type: YTN; PAM sequence: TTA
aaaggtaactaagtcaaaga

SEQ ID NO: 82333 - DNA, 20 bp, Artificial Sequence
  Description of Artificial Sequence: Synthetic oligonucleotide
  Target: SCNA; (+) strand; PAM type: YTN; PAM sequence: CTA
agtcaaagaaacttgtgctt

SEQ ID NO: 82334 - DNA, 20 bp, Artificial Sequence
  Description of Artificial Sequence: Synthetic oligonucleotide
  Target: SCNA; (+) strand; PAM type: YTN; PAM sequence: CTT
gtgcttgcagaacttggaaa

SEQ ID NO: 82335 - DNA, 20 bp, Artificial Sequence
  Description of Artificial Sequence: Synthetic oligonucleotide
  Target: SCNA; (+) strand; PAM type: YTN; PAM sequence: TTG
tgcttgcagaacttggaaat

SEQ ID NO: 82336 - DNA, 20 bp, Artificial Sequence
  Description of Artificial Sequence: Synthetic oligonucleotide
  Target: SCNA; (+) strand; PAM type: YTN; PAM sequence: CTT
gcagaacttggaaatctgag

SEQ ID NO: 82337 - DNA, 20 bp, Artificial Sequence
  Description of Artificial Sequence: Synthetic oligonucleotide
  Target: SCNA; (+) strand; PAM type: YTN; PAM sequence: TTG
cagaacttggaaatctgagg

SEQ ID NO: 82338 - DNA, 20 bp, Artificial Sequence
  Description of Artificial Sequence: Synthetic oligonucleotide
  Target: SCNA; (+) strand; PAM type: YTN; PAM sequence: CTT
ggaaatctgaggacaaacgg

SEQ ID NO: 82339 - DNA, 20 bp, Artificial Sequence
  Description of Artificial Sequence: Synthetic oligonucleotide
  Target: SCNA; (+) strand; PAM type: YTN; PAM sequence: TTG
gaaatctgaggacaaacgga

SEQ ID NO: 82340 - DNA, 20 bp, Artificial Sequence
  Description of Artificial Sequence: Synthetic oligonucleotide
  Target: SCNA; (+) strand; PAM type: YTN; PAM sequence: CTG
aggacaaacggaaagatatt

SEQ ID NO: 82341 - DNA, 20 bp, Artificial Sequence
  Description of Artificial Sequence: Synthetic oligonucleotide
  Target: SCNA; (+) strand; PAM type: YTN; PAM sequence: TTG
ataaactgcatgtcactgat

SEQ ID NO: 82342 - DNA, 20 bp, Artificial Sequence
  Description of Artificial Sequence: Synthetic oligonucleotide
  Target: SCNA; (+) strand; PAM type: YTN; PAM sequence: CTG
catgtcactgattcagtatt

SEQ ID NO: 82343 - DNA, 20 bp, Artificial Sequence
  Description of Artificial Sequence: Synthetic oligonucleotide
  Target: SCNA; (+) strand; PAM type: YTN; PAM sequence: CTG
attcagtattccaaattcca

SEQ ID NO: 82344 - DNA, 20 bp, Artificial Sequence
  Description of Artificial Sequence: Synthetic oligonucleotide
  Target: SCNA; (+) strand; PAM type: YTN; PAM sequence: TTC
agtattccaaattccatcta

SEQ ID NO: 82345 - DNA, 20 bp, Artificial Sequence
  Description of Artificial Sequence: Synthetic oligonucleotide
  Target: SCNA; (+) strand; PAM type: YTN; PAM sequence: TTC
caaattccatctaaaaaggt

SEQ ID NO: 82346 - DNA, 20 bp, Artificial Sequence
  Description of Artificial Sequence: Synthetic oligonucleotide
  Target: SCNA; (+) strand; PAM type: YTN; PAM sequence: TTC
catctaaaaaggtataattc

SEQ ID NO: 82347 - DNA, 20 bp, Artificial Sequence
  Description of Artificial Sequence: Synthetic oligonucleotide
  Target: SCNA; (+) strand; PAM type: YTN; PAM sequence: CTA
aaaaggtataattcacactt

SEQ ID NO: 82348 - DNA, 20 bp, Artificial Sequence
  Description of Artificial Sequence: Synthetic oligonucleotide
  Target: SCNA; (+) strand; PAM type: YTN; PAM sequence: TTC
acacttcataaaatatttaa

SEQ ID NO: 82349 - DNA, 20 bp, Artificial Sequence
  Description of Artificial Sequence: Synthetic oligonucleotide
  Target: SCNA; (+) strand; PAM type: YTN; PAM sequence: CTT
cataaaatatttaaaattaa

SEQ ID NO: 82350 - DNA, 20 bp, Artificial Sequence
  Description of Artificial Sequence: Synthetic oligonucleotide
  Target: SCNA; (+) strand; PAM type: YTN; PAM sequence: TTC
ataaaatatttaaaattaac

SEQ ID NO: 82351 - DNA, 20 bp, Artificial Sequence
  Description of Artificial Sequence: Synthetic oligonucleotide
  Target: SCNA; (+) strand; PAM type: YTN; PAM sequence: TTT
aaaattaactcatcaatttt

SEQ ID NO: 82352 - DNA, 20 bp, Artificial Sequence
  Description of Artificial Sequence: Synthetic oligonucleotide
  Target: SCNA; (+) strand; PAM type: YTN; PAM sequence: TTA
aaattaactcatcaattttt

SEQ ID NO: 82353 - DNA, 20 bp, Artificial Sequence
  Description of Artificial Sequence: Synthetic oligonucleotide
  Target: SCNA; (+) strand; PAM type: YTN; PAM sequence: TTA
actcatcaattttttcctct

SEQ ID NO: 82354 - DNA, 20 bp, Artificial Sequence
  Description of Artificial Sequence: Synthetic oligonucleotide
  Target: SCNA; (+) strand; PAM type: YTN; PAM sequence: CTC
atcaattttttcctcttgta

SEQ ID NO: 82355 - DNA, 20 bp, Artificial Sequence
  Description of Artificial Sequence: Synthetic oligonucleotide
  Target: SCNA; (+) strand; PAM type: YTN; PAM sequence: TTT
tttcctcttgtaacacccta

SEQ ID NO: 82356 - DNA, 20 bp, Artificial Sequence
  Description of Artificial Sequence: Synthetic oligonucleotide
  Target: SCNA; (+) strand; PAM type: YTN; PAM sequence: TTT
ttcctcttgtaacaccctat

SEQ ID NO: 82357 - DNA, 20 bp, Artificial Sequence
  Description of Artificial Sequence: Synthetic oligonucleotide
  Target: SCNA; (+) strand; PAM type: YTN; PAM sequence: TTT
tcctcttgtaacaccctatt

SEQ ID NO: 82358 - DNA, 20 bp, Artificial Sequence
  Description of Artificial Sequence: Synthetic oligonucleotide
  Target: SCNA; (+) strand; PAM type: YTN; PAM sequence: TTT
cctcttgtaacaccctattt

SEQ ID NO: 82359 - DNA, 20 bp, Artificial Sequence
  Description of Artificial Sequence: Synthetic oligonucleotide
  Target: SCNA; (+) strand; PAM type: YTN; PAM sequence: TTC
ctcttgtaacaccctatttc

SEQ ID NO: 82360 - DNA, 20 bp, Artificial Sequence
  Description of Artificial Sequence: Synthetic oligonucleotide
  Target: SCNA; (+) strand; PAM type: YTN; PAM sequence: CTC
ttgtaacaccctatttcaat

SEQ ID NO: 82361 - DNA, 20 bp, Artificial Sequence
  Description of Artificial Sequence: Synthetic oligonucleotide
  Target: SCNA; (+) strand; PAM type: YTN; PAM sequence: CTT
gtaacaccctatttcaatga

SEQ ID NO: 82362 - DNA, 20 bp, Artificial Sequence
  Description of Artificial Sequence: Synthetic oligonucleotide
  Target: SCNA; (+) strand; PAM type: YTN; PAM sequence: TTG
taacaccctatttcaatgac

SEQ ID NO: 82363 - DNA, 20 bp, Artificial Sequence
  Description of Artificial Sequence: Synthetic oligonucleotide
  Target: SCNA; (+) strand; PAM type: YTN; PAM sequence: CTA
tttcaatgactttctgaaaa

SEQ ID NO: 82364 - DNA, 20 bp, Artificial Sequence
  Description of Artificial Sequence: Synthetic oligonucleotide
  Target: SCNA; (+) strand; PAM type: YTN; PAM sequence: TTT
caatgactttctgaaaatat

SEQ ID NO: 82365 - DNA, 20 bp, Artificial Sequence
  Description of Artificial Sequence: Synthetic oligonucleotide
  Target: SCNA; (+) strand; PAM type: YTN; PAM sequence: TTC
aatgactttctgaaaatatg

SEQ ID NO: 82366 - DNA, 20 bp, Artificial Sequence
  Description of Artificial Sequence: Synthetic oligonucleotide
  Target: SCNA; (+) strand; PAM type: YTN; PAM sequence: CTT
tctgaaaatatgttttaagg

SEQ ID NO: 82367 - DNA, 20 bp, Artificial Sequence
  Description of Artificial Sequence: Synthetic oligonucleotide
  Target: SCNA; (+) strand; PAM type: YTN; PAM sequence: TTT
ctgaaaatatgttttaaggt

SEQ ID NO: 82368 - DNA, 20 bp, Artificial Sequence
  Description of Artificial Sequence: Synthetic oligonucleotide
  Target: SCNA; (+) strand; PAM type: YTN; PAM sequence: TTC
tgaaaatatgttttaaggta

SEQ ID NO: 82369 - DNA, 20 bp, Artificial Sequence
  Description of Artificial Sequence: Synthetic oligonucleotide
  Target: SCNA; (+) strand; PAM type: YTN; PAM sequence: CTG
aaaatatgttttaaggtaga

SEQ ID NO: 82370 - DNA, 20 bp, Artificial Sequence
  Description of Artificial Sequence: Synthetic oligonucleotide
  Target: SCNA; (+) strand; PAM type: YTN; PAM sequence: TTT
taaggtagaaaaaaagtaat

SEQ ID NO: 82371 - DNA, 20 bp, Artificial Sequence
  Description of Artificial Sequence: Synthetic oligonucleotide
  Target: SCNA; (+) strand; PAM type: YTN; PAM sequence: TTT
aaggtagaaaaaaagtaatt

SEQ ID NO: 82372 - DNA, 20 bp, Artificial Sequence
  Description of Artificial Sequence: Synthetic oligonucleotide
  Target: SCNA; (+) strand; PAM type: YTN; PAM sequence: TTA
aggtagaaaaaaagtaattt

SEQ ID NO: 82373 - DNA, 20 bp, Artificial Sequence
  Description of Artificial Sequence: Synthetic oligonucleotide
  Target: SCNA; (+) strand; PAM type: YTN; PAM sequence: TTT
aattgaagatttgtgggaag

SEQ ID NO: 82374 - DNA, 20 bp, Artificial Sequence
  Description of Artificial Sequence: Synthetic oligonucleotide
  Target: SCNA; (+) strand; PAM type: YTN; PAM sequence: TTA
attgaagatttgtgggaaga

SEQ ID NO: 82375 - DNA, 20 bp, Artificial Sequence
  Description of Artificial Sequence: Synthetic oligonucleotide
  Target: SCNA; (+) strand; PAM type: YTN; PAM sequence: TTG
aagatttgtgggaagattaa

SEQ ID NO: 82376 - DNA, 20 bp, Artificial Sequence
  Description of Artificial Sequence: Synthetic oligonucleotide
  Target: SCNA; (+) strand; PAM type: YTN; PAM sequence: TTT
gtgggaagattaagtcaaca

SEQ ID NO: 82377 - DNA, 20 bp, Artificial Sequence
  Description of Artificial Sequence: Synthetic oligonucleotide
  Target: SCNA; (+) strand; PAM type: YTN; PAM sequence: TTG
tgggaagattaagtcaacat

SEQ ID NO: 82378 - DNA, 20 bp, Artificial Sequence
  Description of Artificial Sequence: Synthetic oligonucleotide
  Target: SCNA; (+) strand; PAM type: YTN; PAM sequence: TTA
agtcaacataagaaaagtct

SEQ ID NO: 82379 - DNA, 20 bp, Artificial Sequence
  Description of Artificial Sequence: Synthetic oligonucleotide
  Target: SCNA; (+) strand; PAM type: YTN; PAM sequence: CTA
aataatgaggcagtggcaca

SEQ ID NO: 82380 - DNA, 20 bp, Artificial Sequence
  Description of Artificial Sequence: Synthetic oligonucleotide
  Target: SCNA; (+) strand; PAM type: YTN; PAM sequence: CTA
taatcctggctactcaggag

SEQ ID NO: 82381 - DNA, 20 bp, Artificial Sequence
  Description of Artificial Sequence: Synthetic oligonucleotide
  Target: SCNA; (+) strand; PAM type: YTN; PAM sequence: CTG
gctactcaggaggctgaggt

SEQ ID NO: 82382 - DNA, 20 bp, Artificial Sequence
  Description of Artificial Sequence: Synthetic oligonucleotide
  Target: SCNA; (+) strand; PAM type: YTN; PAM sequence: CTA
ctcaggaggctgaggtgggg

SEQ ID NO: 82383 - DNA, 20 bp, Artificial Sequence
  Description of Artificial Sequence: Synthetic oligonucleotide
  Target: SCNA; (+) strand; PAM type: YTN; PAM sequence: CTC
aggaggctgaggtgggggca

SEQ ID NO: 82384 - DNA, 20 bp, Artificial Sequence
  Description of Artificial Sequence: Synthetic oligonucleotide
  Target: SCNA; (+) strand; PAM type: YTN; PAM sequence: CTG
aggtgggggcatgacttgag

SEQ ID NO: 82385 - DNA, 20 bp, Artificial Sequence
  Description of Artificial Sequence: Synthetic oligonucleotide
  Target: SCNA; (+) strand; PAM type: YTN; PAM sequence: CTT
gagcccaggaattcaaggat

SEQ ID NO: 82386 - DNA, 20 bp, Artificial Sequence
  Description of Artificial Sequence: Synthetic oligonucleotide
  Target: SCNA; (+) strand; PAM type: YTN; PAM sequence: TTG
agcccaggaattcaaggatg

SEQ ID NO: 82387 - DNA, 20 bp, Artificial Sequence
  Description of Artificial Sequence: Synthetic oligonucleotide
  Target: SCNA; (+) strand; PAM type: YTN; PAM sequence: TTC
aaggatgcagtgagctatga

SEQ ID NO: 82388 - DNA, 20 bp, Artificial Sequence
  Description of Artificial Sequence: Synthetic oligonucleotide
  Target: SCNA; (+) strand; PAM type: YTN; PAM sequence: CTA
tgatagcatcactgcagtcc

SEQ ID NO: 82389 - DNA, 20 bp, Artificial Sequence
  Description of Artificial Sequence: Synthetic oligonucleotide
  Target: SCNA; (+) strand; PAM type: YTN; PAM sequence: CTG
cagtccagcctgggcgacag

SEQ ID NO: 82390 - DNA, 20 bp, Artificial Sequence
  Description of Artificial Sequence: Synthetic oligonucleotide
  Target: SCNA; (+) strand; PAM type: YTN; PAM sequence: CTG
ggcgacagagcaaggccctg

SEQ ID NO: 82391 - DNA, 20 bp, Artificial Sequence
  Description of Artificial Sequence: Synthetic oligonucleotide
  Target: SCNA; (+) strand; PAM type: YTN; PAM sequence: CTG
actctaaaaactgaaaataa

SEQ ID NO: 82392 - DNA, 20 bp, Artificial Sequence
  Description of Artificial Sequence: Synthetic oligonucleotide
  Target: SCNA; (+) strand; PAM type: YTN; PAM sequence: CTC
taaaaactgaaaataaaaaa

SEQ ID NO: 82393 - DNA, 20 bp, Artificial Sequence
  Description of Artificial Sequence: Synthetic oligonucleotide
  Target: SCNA; (+) strand; PAM type: YTN; PAM sequence: CTA
aaaactgaaaataaaaaact

SEQ ID NO: 82394 - DNA, 20 bp, Artificial Sequence
  Description of Artificial Sequence: Synthetic oligonucleotide
  Target: SCNA; (+) strand; PAM type: YTN; PAM sequence: CTG
aaaataaaaaactgaaaaaa

SEQ ID NO: 82395 - DNA, 20 bp, Artificial Sequence
  Description of Artificial Sequence: Synthetic oligonucleotide
  Target: SCNA; (+) strand; PAM type: YTN; PAM sequence: CTG
aaaaaaaaatgtgttgtgaa

SEQ ID NO: 82396 - DNA, 20 bp, Artificial Sequence
  Description of Artificial Sequence: Synthetic oligonucleotide
  Target: SCNA; (+) strand; PAM type: YTN; PAM sequence: TTG
tgaactttgatgagatgcat

SEQ ID NO: 82397 - DNA, 20 bp, Artificial Sequence
  Description of Artificial Sequence: Synthetic oligonucleotide
  Target: SCNA; (+) strand; PAM type: YTN; PAM sequence: CTT
tgatgagatgcattcatata

SEQ ID NO: 82398 - DNA, 20 bp, Artificial Sequence
  Description of Artificial Sequence: Synthetic oligonucleotide
  Target: SCNA; (+) strand; PAM type: YTN; PAM sequence: TTT
gatgagatgcattcatataa

SEQ ID NO: 82399 - DNA, 20 bp, Artificial Sequence
  Description of Artificial Sequence: Synthetic oligonucleotide
  Target: SCNA; (+) strand; PAM type: YTN; PAM sequence: TTG
atgagatgcattcatataaa

SEQ ID NO: 82400 - DNA, 20 bp, Artificial Sequence
  Description of Artificial Sequence: Synthetic oligonucleotide
  Target: SCNA; (+) strand; PAM type: YTN; PAM sequence: TTC
atataaatcatcccaagtat

SEQ ID NO: 82401 - DNA, 20 bp, Artificial Sequence
  Description of Artificial Sequence: Synthetic oligonucleotide
  Target: SCNA; (+) strand; PAM type: YTN; PAM sequence: TTT
cccccactgatctatgttga

SEQ ID NO: 82402 - DNA, 20 bp, Artificial Sequence
  Description of Artificial Sequence: Synthetic oligonucleotide
  Target: SCNA; (+) strand; PAM type: YTN; PAM sequence: TTC
ccccactgatctatgttgaa

SEQ ID NO: 82403 - DNA, 20 bp, Artificial Sequence
  Description of Artificial Sequence: Synthetic oligonucleotide
  Target: SCNA; (+) strand; PAM type: YTN; PAM sequence: CTG
atctatgttgaagagatagt

SEQ ID NO: 82404 - DNA, 20 bp, Artificial Sequence
  Description of Artificial Sequence: Synthetic oligonucleotide
  Target: SCNA; (+) strand; PAM type: YTN; PAM sequence: CTA
tgttgaagagatagtgtagc

SEQ ID NO: 82405 - DNA, 20 bp, Artificial Sequence
  Description of Artificial Sequence: Synthetic oligonucleotide
  Target: SCNA; (+) strand; PAM type: YTN; PAM sequence: TTG
aagagatagtgtagctttct

SEQ ID NO: 82406 - DNA, 20 bp, Artificial Sequence
  Description of Artificial Sequence: Synthetic oligonucleotide
  Target: SCNA; (+) strand; PAM type: YTN; PAM sequence: CTT
tctttcactttgcagacata

SEQ ID NO: 82407 - DNA, 20 bp, Artificial Sequence
  Description of Artificial Sequence: Synthetic oligonucleotide
  Target: SCNA; (+) strand; PAM type: YTN; PAM sequence: TTT
ctttcactttgcagacatag

SEQ ID NO: 82408 - DNA, 20 bp, Artificial Sequence
  Description of Artificial Sequence: Synthetic oligonucleotide
  Target: SCNA; (+) strand; PAM type: YTN; PAM sequence: TTC
tttcactttgcagacataga

SEQ ID NO: 82409 - DNA, 20 bp, Artificial Sequence
  Description of Artificial Sequence: Synthetic oligonucleotide
  Target: SCNA; (+) strand; PAM type: YTN; PAM sequence: CTT
tcactttgcagacatagacg

SEQ ID NO: 82410 - DNA, 20 bp, Artificial Sequence
  Description of Artificial Sequence: Synthetic oligonucleotide
  Target: SCNA; (+) strand; PAM type: YTN; PAM sequence: TTT
cactttgcagacatagacgg

SEQ ID NO: 82411 - DNA, 20 bp, Artificial Sequence
  Description of Artificial Sequence: Synthetic oligonucleotide
  Target: SCNA; (+) strand; PAM type: YTN; PAM sequence: TTC
actttgcagacatagacgga

SEQ ID NO: 82412 - DNA, 20 bp, Artificial Sequence
  Description of Artificial Sequence: Synthetic oligonucleotide
  Target: SCNA; (+) strand; PAM type: YTN; PAM sequence: CTT
tgcagacatagacggagcac

SEQ ID NO: 82413 - DNA, 20 bp, Artificial Sequence
  Description of Artificial Sequence: Synthetic oligonucleotide
  Target: SCNA; (+) strand; PAM type: YTN; PAM sequence: TTT
gcagacatagacggagcaca

SEQ ID NO: 82414 - DNA, 20 bp, Artificial Sequence
  Description of Artificial Sequence: Synthetic oligonucleotide
  Target: SCNA; (+) strand; PAM type: YTN; PAM sequence: TTG
cagacatagacggagcacat

SEQ ID NO: 82415 - DNA, 20 bp, Artificial Sequence
  Description of Artificial Sequence: Synthetic oligonucleotide
  Target: SCNA; (+) strand; PAM type: YTN; PAM sequence: TTT
cagctaggcaactcaatgtg

SEQ ID NO: 82416 - DNA, 20 bp, Artificial Sequence
  Description of Artificial Sequence: Synthetic oligonucleotide
  Target: SCNA; (+) strand; PAM type: YTN; PAM sequence: TTC
agctaggcaactcaatgtgg

SEQ ID NO: 82417 - DNA, 20 bp, Artificial Sequence
  Description of Artificial Sequence: Synthetic oligonucleotide
  Target: SCNA; (+) strand; PAM type: YTN; PAM sequence: CTA
ggcaactcaatgtggtcatc

SEQ ID NO: 82418 - DNA, 20 bp, Artificial Sequence
  Description of Artificial Sequence: Synthetic oligonucleotide
  Target: SCNA; (+) strand; PAM type: YTN; PAM sequence: CTC
aatgtggtcatcctccacct

SEQ ID NO: 82419 - DNA, 20 bp, Artificial Sequence
  Description of Artificial Sequence: Synthetic oligonucleotide
  Target: SCNA; (+) strand; PAM type: YTN; PAM sequence: CTC
cacctgactgttcatcctgt

SEQ ID NO: 82420 - DNA, 20 bp, Artificial Sequence
  Description of Artificial Sequence: Synthetic oligonucleotide
  Target: SCNA; (+) strand; PAM type: YTN; PAM sequence: CTG
actgttcatcctgtgactct

SEQ ID NO: 82421 - DNA, 20 bp, Artificial Sequence
  Description of Artificial Sequence: Synthetic oligonucleotide
  Target: SCNA; (+) strand; PAM type: YTN; PAM sequence: CTG
ttcatcctgtgactcttact

SEQ ID NO: 82422 - DNA, 20 bp, Artificial Sequence
  Description of Artificial Sequence: Synthetic oligonucleotide
  Target: SCNA; (+) strand; PAM type: YTN; PAM sequence: TTC
atcctgtgactcttactgct

SEQ ID NO: 82423 - DNA, 20 bp, Artificial Sequence
  Description of Artificial Sequence: Synthetic oligonucleotide
  Target: SCNA; (+) strand; PAM type: YTN; PAM sequence: CTG
tgactcttactgctatagtt

SEQ ID NO: 82424 - DNA, 20 bp, Artificial Sequence
  Description of Artificial Sequence: Synthetic oligonucleotide
  Target: SCNA; (+) strand; PAM type: YTN; PAM sequence: CTC
ttactgctatagttgccacc

SEQ ID NO: 82425 - DNA, 20 bp, Artificial Sequence
  Description of Artificial Sequence: Synthetic oligonucleotide
  Target: SCNA; (+) strand; PAM type: YTN; PAM sequence: CTT
actgctatagttgccaccag

SEQ ID NO: 82426 - DNA, 20 bp, Artificial Sequence
  Description of Artificial Sequence: Synthetic oligonucleotide
  Target: SCNA; (+) strand; PAM type: YTN; PAM sequence: TTA
ctgctatagttgccaccaga

SEQ ID NO: 82427 - DNA, 20 bp, Artificial Sequence
  Description of Artificial Sequence: Synthetic oligonucleotide
  Target: SCNA; (+) strand; PAM type: YTN; PAM sequence: CTG
ctatagttgccaccagagaa

SEQ ID NO: 82428 - DNA, 20 bp, Artificial Sequence
  Description of Artificial Sequence: Synthetic oligonucleotide
  Target: SCNA; (+) strand; PAM type: YTN; PAM sequence: CTA
tagttgccaccagagaatgt

SEQ ID NO: 82429 - DNA, 20 bp, Artificial Sequence
  Description of Artificial Sequence: Synthetic oligonucleotide
  Target: SCNA; (+) strand; PAM type: YTN; PAM sequence: TTG
ccaccagagaatgtgaaaaa

SEQ ID NO: 82430 - DNA, 20 bp, Artificial Sequence
  Description of Artificial Sequence: Synthetic oligonucleotide
  Target: SCNA; (+) strand; PAM type: YTN; PAM sequence: CTC
agaggagaaagaagagagga

SEQ ID NO: 82431 - DNA, 20 bp, Artificial Sequence
  Description of Artificial Sequence: Synthetic oligonucleotide
  Target: SCNA; (+) strand; PAM type: YTN; PAM sequence: CTG
tgttgagtgtgtgtgtctat

SEQ ID NO: 82432 - DNA, 20 bp, Artificial Sequence
  Description of Artificial Sequence: Synthetic oligonucleotide
  Target: SCNA; (+) strand; PAM type: YTN; PAM sequence: TTG
agtgtgtgtgtctatgcctg

SEQ ID NO: 82433 - DNA, 20 bp, Artificial Sequence
  Description of Artificial Sequence: Synthetic oligonucleotide
  Target: SCNA; (+) strand; PAM type: YTN; PAM sequence: CTA
tgcctgtggatgagagtgtg

SEQ ID NO: 82434 - DNA, 20 bp, Artificial Sequence
  Description of Artificial Sequence: Synthetic oligonucleotide
  Target: SCNA; (+) strand; PAM type: YTN; PAM sequence: CTG
tggatgagagtgtgtgtcta

SEQ ID NO: 82435 - DNA, 20 bp, Artificial Sequence
  Description of Artificial Sequence: Synthetic oligonucleotide
  Target: SCNA; (+) strand; PAM type: YTN; PAM sequence: CTA
ttcttttccaaggaattcaa

SEQ ID NO: 82436 - DNA, 20 bp, Artificial Sequence
  Description of Artificial Sequence: Synthetic oligonucleotide
  Target: SCNA; (+) strand; PAM type: YTN; PAM sequence: TTC
ttttccaaggaattcaaagt

SEQ ID NO: 82437 - DNA, 20 bp, Artificial Sequence
  Description of Artificial Sequence: Synthetic oligonucleotide
  Target: SCNA; (+) strand; PAM type: YTN; PAM sequence: CTT
ttccaaggaattcaaagtgg

SEQ ID NO: 82438 - DNA, 20 bp, Artificial Sequence
  Description of Artificial Sequence: Synthetic oligonucleotide
  Target: SCNA; (+) strand; PAM type: YTN; PAM sequence: TTT
tccaaggaattcaaagtggt

SEQ ID NO: 82439 - DNA, 20 bp, Artificial Sequence
  Description of Artificial Sequence: Synthetic oligonucleotide
  Target: SCNA; (+) strand; PAM type: YTN; PAM sequence: TTT
ccaaggaattcaaagtggtt

SEQ ID NO: 82440 - DNA, 20 bp, Artificial Sequence
  Description of Artificial Sequence: Synthetic oligonucleotide
  Target: SCNA; (+) strand; PAM type: YTN; PAM sequence: TTC
caaggaattcaaagtggttt

SEQ ID NO: 82441 - DNA, 20 bp, Artificial Sequence
  Description of Artificial Sequence: Synthetic oligonucleotide
  Target: SCNA; (+) strand; PAM type: YTN; PAM sequence: TTC
aaagtggtttgtaaaataac

SEQ ID NO: 82442 - DNA, 20 bp, Artificial Sequence
  Description of Artificial Sequence: Synthetic oligonucleotide
  Target: SCNA; (+) strand; PAM type: YTN; PAM sequence: TTT
gtaaaataacactcaattga

SEQ ID NO: 82443 - DNA, 20 bp, Artificial Sequence
  Description of Artificial Sequence: Synthetic oligonucleotide
  Target: SCNA; (+) strand; PAM type: YTN; PAM sequence: TTG
taaaataacactcaattgaa

SEQ ID NO: 82444 - DNA, 20 bp, Artificial Sequence
  Description of Artificial Sequence: Synthetic oligonucleotide
  Target: SCNA; (+) strand; PAM type: YTN; PAM sequence: CTC
aattgaatacagttcaagtt

SEQ ID NO: 82445 - DNA, 20 bp, Artificial Sequence
  Description of Artificial Sequence: Synthetic oligonucleotide
  Target: SCNA; (+) strand; PAM type: YTN; PAM sequence: TTG
aatacagttcaagttacaga

SEQ ID NO: 82446 - DNA, 20 bp, Artificial Sequence
  Description of Artificial Sequence: Synthetic oligonucleotide
  Target: SCNA; (+) strand; PAM type: YTN; PAM sequence: TTC
aagttacagaaaagagagtc

SEQ ID NO: 82447 - DNA, 20 bp, Artificial Sequence
  Description of Artificial Sequence: Synthetic oligonucleotide
  Target: SCNA; (+) strand; PAM type: YTN; PAM sequence: TTA
cagaaaagagagtcagagtt

SEQ ID NO: 82448 - DNA, 20 bp, Artificial Sequence
  Description of Artificial Sequence: Synthetic oligonucleotide
  Target: SCNA; (+) strand; PAM type: YTN; PAM sequence: TTT
gggtgtataccccaaggtgg

SEQ ID NO: 82449 - DNA, 20 bp, Artificial Sequence
  Description of Artificial Sequence: Synthetic oligonucleotide
  Target: SCNA; (+) strand; PAM type: YTN; PAM sequence: TTG
ggtgtataccccaaggtgga

SEQ ID NO: 82450 - DNA, 20 bp, Artificial Sequence
  Description of Artificial Sequence: Synthetic oligonucleotide
  Target: SCNA; (+) strand; PAM type: YTN; PAM sequence: CTT
taggaacaagtaggtaataa

SEQ ID NO: 82451 - DNA, 20 bp, Artificial Sequence
  Description of Artificial Sequence: Synthetic oligonucleotide
  Target: SCNA; (+) strand; PAM type: YTN; PAM sequence: TTT
aggaacaagtaggtaataag

SEQ ID NO: 82452 - DNA, 20 bp, Artificial Sequence
  Description of Artificial Sequence: Synthetic oligonucleotide
  Target: SCNA; (+) strand; PAM type: YTN; PAM sequence: TTA
ggaacaagtaggtaataagc

SEQ ID NO: 82453 - DNA, 20 bp, Artificial Sequence
  Description of Artificial Sequence: Synthetic oligonucleotide
  Target: SCNA; (+) strand; PAM type: YTN; PAM sequence: TTT
ctttattcttttagtatgtg

SEQ ID NO: 82454 - DNA, 20 bp, Artificial Sequence
  Description of Artificial Sequence: Synthetic oligonucleotide
  Target: SCNA; (+) strand; PAM type: YTN; PAM sequence: TTC
tttattcttttagtatgtgt

SEQ ID NO: 82455 - DNA, 20 bp, Artificial Sequence
  Description of Artificial Sequence: Synthetic oligonucleotide
  Target: SCNA; (+) strand; PAM type: YTN; PAM sequence: CTT
tattcttttagtatgtgtgt

SEQ ID NO: 82456 - DNA, 20 bp, Artificial Sequence
  Description of Artificial Sequence: Synthetic oligonucleotide
  Target: SCNA; (+) strand; PAM type: YTN; PAM sequence: TTT
attcttttagtatgtgtgtc

SEQ ID NO: 82457 - DNA, 20 bp, Artificial Sequence
  Description of Artificial Sequence: Synthetic oligonucleotide
  Target: SCNA; (+) strand; PAM type: YTN; PAM sequence: TTA
ttcttttagtatgtgtgtca

SEQ ID NO: 82458 - DNA, 20 bp, Artificial Sequence
  Description of Artificial Sequence: Synthetic oligonucleotide
  Target: SCNA; (+) strand; PAM type: YTN; PAM sequence: TTC
ttttagtatgtgtgtcattt

SEQ ID NO: 82459 - DNA, 20 bp, Artificial Sequence
  Description of Artificial Sequence: Synthetic oligonucleotide
  Target: SCNA; (+) strand; PAM type: YTN; PAM sequence: CTT
ttagtatgtgtgtcatttga

SEQ ID NO: 82460 - DNA, 20 bp, Artificial Sequence
  Description of Artificial Sequence: Synthetic oligonucleotide
  Target: SCNA; (+) strand; PAM type: YTN; PAM sequence: TTT
tagtatgtgtgtcatttgat

SEQ ID NO: 82461 - DNA, 20 bp, Artificial Sequence
  Description of Artificial Sequence: Synthetic oligonucleotide
  Target: SCNA; (+) strand; PAM type: YTN; PAM sequence: TTT
agtatgtgtgtcatttgatg

SEQ ID NO: 82462 - DNA, 20 bp, Artificial Sequence
  Description of Artificial Sequence: Synthetic oligonucleotide
  Target: SCNA; (+) strand; PAM type: YTN; PAM sequence: TTA
gtatgtgtgtcatttgatgg

SEQ ID NO: 82463 - DNA, 20 bp, Artificial Sequence
  Description of Artificial Sequence: Synthetic oligonucleotide
  Target: SCNA; (+) strand; PAM type: YTN; PAM sequence: TTT
gatggatgaactatacaaat

SEQ ID NO: 82464 - DNA, 20 bp, Artificial Sequence
  Description of Artificial Sequence: Synthetic oligonucleotide
  Target: SCNA; (+) strand; PAM type: YTN; PAM sequence: TTG
atggatgaactatacaaatg

SEQ ID NO: 82465 - DNA, 20 bp, Artificial Sequence
  Description of Artificial Sequence: Synthetic oligonucleotide
  Target: SCNA; (+) strand; PAM type: YTN; PAM sequence: CTA
tacaaatgtttctgagagat

SEQ ID NO: 82466 - DNA, 20 bp, Artificial Sequence
  Description of Artificial Sequence: Synthetic oligonucleotide
  Target: SCNA; (+) strand; PAM type: YTN; PAM sequence: TTT
ctgagagattagtagcagcc

SEQ ID NO: 82467 - DNA, 20 bp, Artificial Sequence
  Description of Artificial Sequence: Synthetic oligonucleotide
  Target: SCNA; (+) strand; PAM type: YTN; PAM sequence: TTC
tgagagattagtagcagccc

SEQ ID NO: 82468 - DNA, 20 bp, Artificial Sequence
  Description of Artificial Sequence: Synthetic oligonucleotide
  Target: SCNA; (+) strand; PAM type: YTN; PAM sequence: CTG
agagattagtagcagccctc

SEQ ID NO: 82469 - DNA, 20 bp, Artificial Sequence
  Description of Artificial Sequence: Synthetic oligonucleotide
  Target: SCNA; (+) strand; PAM type: YTN; PAM sequence: TTA
gtagcagccctcaagcactt

SEQ ID NO: 82470 - DNA, 20 bp, Artificial Sequence
  Description of Artificial Sequence: Synthetic oligonucleotide
  Target: SCNA; (+) strand; PAM type: YTN; PAM sequence: CTC
aagcacttttctctgtcctc

SEQ ID NO: 82471 - DNA, 20 bp, Artificial Sequence
  Description of Artificial Sequence: Synthetic oligonucleotide
  Target: SCNA; (+) strand; PAM type: YTN; PAM sequence: CTT
ttctctgtcctcagtgttca

SEQ ID NO: 82472 - DNA, 20 bp, Artificial Sequence
  Description of Artificial Sequence: Synthetic oligonucleotide
  Target: SCNA; (+) strand; PAM type: YTN; PAM sequence: TTT
tctctgtcctcagtgttcac

SEQ ID NO: 82473 - DNA, 20 bp, Artificial Sequence
  Description of Artificial Sequence: Synthetic oligonucleotide
  Target: SCNA; (+) strand; PAM type: YTN; PAM sequence: TTT
ctctgtcctcagtgttcaca

SEQ ID NO: 82474 - DNA, 20 bp, Artificial Sequence
  Description of Artificial Sequence: Synthetic oligonucleotide
  Target: SCNA; (+) strand; PAM type: YTN; PAM sequence: TTC
tctgtcctcagtgttcacag

SEQ ID NO: 82475 - DNA, 20 bp, Artificial Sequence
  Description of Artificial Sequence: Synthetic oligonucleotide
  Target: SCNA; (+) strand; PAM type: YTN; PAM sequence: CTC
tgtcctcagtgttcacagag

SEQ ID NO: 82476 - DNA, 20 bp, Artificial Sequence
  Description of Artificial Sequence: Synthetic oligonucleotide
  Target: SCNA; (+) strand; PAM type: YTN; PAM sequence: CTG
tcctcagtgttcacagagac

SEQ ID NO: 82477 - DNA, 20 bp, Artificial Sequence
  Description of Artificial Sequence: Synthetic oligonucleotide
  Target: SCNA; (+) strand; PAM type: YTN; PAM sequence: CTC
agtgttcacagagaccaaat

SEQ ID NO: 82478 - DNA, 20 bp, Artificial Sequence
  Description of Artificial Sequence: Synthetic oligonucleotide
  Target: SCNA; (+) strand; PAM type: YTN; PAM sequence: TTC
acagagaccaaatgatcaca

SEQ ID NO: 82479 - DNA, 20 bp, Artificial Sequence
  Description of Artificial Sequence: Synthetic oligonucleotide
  Target: SCNA; (+) strand; PAM type: YTN; PAM sequence: CTC
tatcaaagactaatctgttc

SEQ ID NO: 82480 - DNA, 20 bp, Artificial Sequence
  Description of Artificial Sequence: Synthetic oligonucleotide
  Target: SCNA; (+) strand; PAM type: YTN; PAM sequence: CTA
tcaaagactaatctgttctt

SEQ ID NO: 82481 - DNA, 20 bp, Artificial Sequence
  Description of Artificial Sequence: Synthetic oligonucleotide
  Target: SCNA; (+) strand; PAM type: YTN; PAM sequence: CTA
atctgttctttccattttag

SEQ ID NO: 82482 - DNA, 20 bp, Artificial Sequence
  Description of Artificial Sequence: Synthetic oligonucleotide
  Target: SCNA; (+) strand; PAM type: YTN; PAM sequence: CTG
ttctttccattttagggcca

SEQ ID NO: 82483 - DNA, 20 bp, Artificial Sequence
  Description of Artificial Sequence: Synthetic oligonucleotide
  Target: SCNA; (+) strand; PAM type: YTN; PAM sequence: TTC
tttccattttagggccacaa

SEQ ID NO: 82484 - DNA, 20 bp, Artificial Sequence
  Description of Artificial Sequence: Synthetic oligonucleotide
  Target: SCNA; (+) strand; PAM type: YTN; PAM sequence: CTT
tccattttagggccacaaat

SEQ ID NO: 82485 - DNA, 20 bp, Artificial Sequence
  Description of Artificial Sequence: Synthetic oligonucleotide
  Target: SCNA; (+) strand; PAM type: YTN; PAM sequence: TTT
ccattttagggccacaaata

SEQ ID NO: 82486 - DNA, 20 bp, Artificial Sequence
  Description of Artificial Sequence: Synthetic oligonucleotide
  Target: SCNA; (+) strand; PAM type: YTN; PAM sequence: TTC
cattttagggccacaaatag

SEQ ID NO: 82487 - DNA, 20 bp, Artificial Sequence
  Description of Artificial Sequence: Synthetic oligonucleotide
  Target: SCNA; (+) strand; PAM type: YTN; PAM sequence: TTT
tagggccacaaataggtctc

SEQ ID NO: 82488 - DNA, 20 bp, Artificial Sequence
  Description of Artificial Sequence: Synthetic oligonucleotide
  Target: SCNA; (+) strand; PAM type: YTN; PAM sequence: TTT
agggccacaaataggtctct

SEQ ID NO: 82489 - DNA, 20 bp, Artificial Sequence
  Description of Artificial Sequence: Synthetic oligonucleotide
  Target: SCNA; (+) strand; PAM type: YTN; PAM sequence: TTA
gggccacaaataggtctctt

SEQ ID NO: 82490 - DNA, 20 bp, Artificial Sequence
  Description of Artificial Sequence: Synthetic oligonucleotide
  Target: SCNA; (+) strand; PAM type: YTN; PAM sequence: CTC
tttatacacatcacaggggc

SEQ ID NO: 82491 - DNA, 20 bp, Artificial Sequence
  Description of Artificial Sequence: Synthetic oligonucleotide
  Target: SCNA; (+) strand; PAM type: YTN; PAM sequence: CTT
tatacacatcacaggggcat

SEQ ID NO: 82492 - DNA, 20 bp, Artificial Sequence
  Description of Artificial Sequence: Synthetic oligonucleotide
  Target: SCNA; (+) strand; PAM type: YTN; PAM sequence: TTT
atacacatcacaggggcata

SEQ ID NO: 82493 - DNA, 20 bp, Artificial Sequence
  Description of Artificial Sequence: Synthetic oligonucleotide
  Target: SCNA; (+) strand; PAM type: YTN; PAM sequence: TTA
tacacatcacaggggcatat

SEQ ID NO: 82494 - DNA, 20 bp, Artificial Sequence
  Description of Artificial Sequence: Synthetic oligonucleotide
  Target: SCNA; (+) strand; PAM type: YTN; PAM sequence: TTT
taaaaatcagaatggattaa

SEQ ID NO: 82495 - DNA, 20 bp, Artificial Sequence
  Description of Artificial Sequence: Synthetic oligonucleotide
  Target: SCNA; (+) strand; PAM type: YTN; PAM sequence: TTT
aaaaatcagaatggattaaa

SEQ ID NO: 82496 - DNA, 20 bp, Artificial Sequence
  Description of Artificial Sequence: Synthetic oligonucleotide
  Target: SCNA; (+) strand; PAM type: YTN; PAM sequence: TTA
aaaatcagaatggattaaaa

SEQ ID NO: 82497 - DNA, 20 bp, Artificial Sequence
  Description of Artificial Sequence: Synthetic oligonucleotide
  Target: SCNA; (+) strand; PAM type: YTN; PAM sequence: TTA
aaattgacaaacatttttca

SEQ ID NO: 82498 - DNA, 20 bp, Artificial Sequence
  Description of Artificial Sequence: Synthetic oligonucleotide
  Target: SCNA; (+) strand; PAM type: YTN; PAM sequence: TTG
acaaacatttttcatgatgg

SEQ ID NO: 82499 - DNA, 20 bp, Artificial Sequence
  Description of Artificial Sequence: Synthetic oligonucleotide
  Target: SCNA; (+) strand; PAM type: YTN; PAM sequence: TTT
ttcatgatggtaaaagaaat

SEQ ID NO: 82500 - DNA, 20 bp, Artificial Sequence
  Description of Artificial Sequence: Synthetic oligonucleotide
  Target: SCNA; (+) strand; PAM type: YTN; PAM sequence: TTT
tcatgatggtaaaagaaatc

SEQ ID NO: 82501 - DNA, 20 bp, Artificial Sequence
  Description of Artificial Sequence: Synthetic oligonucleotide
  Target: SCNA; (+) strand; PAM type: YTN; PAM sequence: TTT
catgatggtaaaagaaatca

SEQ ID NO: 82502 - DNA, 20 bp, Artificial Sequence
  Description of Artificial Sequence: Synthetic oligonucleotide
  Target: SCNA; (+) strand; PAM type: YTN; PAM sequence: TTC
atgatggtaaaagaaatcac

SEQ ID NO: 82503 - DNA, 20 bp, Artificial Sequence
  Description of Artificial Sequence: Synthetic oligonucleotide
  Target: SCNA; (+) strand; PAM type: YTN; PAM sequence: TTT
tgattcttaagaatattctt

SEQ ID NO: 82504 - DNA, 20 bp, Artificial Sequence
  Description of Artificial Sequence: Synthetic oligonucleotide
  Target: SCNA; (+) strand; PAM type: YTN; PAM sequence: TTT
gattcttaagaatattcttg

SEQ ID NO: 82505 - DNA, 20 bp, Artificial Sequence
  Description of Artificial Sequence: Synthetic oligonucleotide
  Target: SCNA; (+) strand; PAM type: YTN; PAM sequence: TTG
attcttaagaatattcttga

SEQ ID NO: 82506 - DNA, 20 bp, Artificial Sequence
  Description of Artificial Sequence: Synthetic oligonucleotide
  Target: SCNA; (+) strand; PAM type: YTN; PAM sequence: TTC
ttaagaatattcttgattat

SEQ ID NO: 82507 - DNA, 20 bp, Artificial Sequence
  Description of Artificial Sequence: Synthetic oligonucleotide
  Target: SCNA; (+) strand; PAM type: YTN; PAM sequence: CTT
aagaatattcttgattattt

SEQ ID NO: 82508 - DNA, 20 bp, Artificial Sequence
  Description of Artificial Sequence: Synthetic oligonucleotide
  Target: SCNA; (+) strand; PAM type: YTN; PAM sequence: TTA
agaatattcttgattatttt

SEQ ID NO: 82509 - DNA, 20 bp, Artificial Sequence
  Description of Artificial Sequence: Synthetic oligonucleotide
  Target: SCNA; (+) strand; PAM type: YTN; PAM sequence: TTC
ttgattattttttaaaagac

SEQ ID NO: 82510 - DNA, 20 bp, Artificial Sequence
  Description of Artificial Sequence: Synthetic oligonucleotide
  Target: SCNA; (+) strand; PAM type: YTN; PAM sequence: CTT
gattattttttaaaagacta

SEQ ID NO: 82511 - DNA, 20 bp, Artificial Sequence
  Description of Artificial Sequence: Synthetic oligonucleotide
  Target: SCNA; (+) strand; PAM type: YTN; PAM sequence: TTG
attattttttaaaagactat

SEQ ID NO: 82512 - DNA, 20 bp, Artificial Sequence
  Description of Artificial Sequence: Synthetic oligonucleotide
  Target: SCNA; (+) strand; PAM type: YTN; PAM sequence: TTA
ttttttaaaagactatgagt

SEQ ID NO: 82513 - DNA, 20 bp, Artificial Sequence
  Description of Artificial Sequence: Synthetic oligonucleotide
  Target: SCNA; (+) strand; PAM type: YTN; PAM sequence: TTT
tttaaaagactatgagtttt

SEQ ID NO: 82514 - DNA, 20 bp, Artificial Sequence
  Description of Artificial Sequence: Synthetic oligonucleotide
  Target: SCNA; (+) strand; PAM type: YTN; PAM sequence: TTT
ttaaaagactatgagttttt

SEQ ID NO: 82515 - DNA, 20 bp, Artificial Sequence
  Description of Artificial Sequence: Synthetic oligonucleotide
  Target: SCNA; (+) strand; PAM type: YTN; PAM sequence: TTT
taaaagactatgagttttta

SEQ ID NO: 82516 - DNA, 20 bp, Artificial Sequence
  Description of Artificial Sequence: Synthetic oligonucleotide
  Target: SCNA; (+) strand; PAM type: YTN; PAM sequence: TTT
aaaagactatgagtttttaa

SEQ ID NO: 82517 - DNA, 20 bp, Artificial Sequence
  Description of Artificial Sequence: Synthetic oligonucleotide
  Target: SCNA; (+) strand; PAM type: YTN; PAM sequence: TTA
aaagactatgagtttttaaa

SEQ ID NO: 82518 - DNA, 20 bp, Artificial Sequence
  Description of Artificial Sequence: Synthetic oligonucleotide
  Target: SCNA; (+) strand; PAM type: YTN; PAM sequence: CTA
tgagtttttaaaactgttct

SEQ ID NO: 82519 - DNA, 20 bp, Artificial Sequence
  Description of Artificial Sequence: Synthetic oligonucleotide
  Target: SCNA; (+) strand; PAM type: YTN; PAM sequence: TTT
ttaaaactgttctctgaaat

SEQ ID NO: 82520 - DNA, 20 bp, Artificial Sequence
  Description of Artificial Sequence: Synthetic oligonucleotide
  Target: SCNA; (+) strand; PAM type: YTN; PAM sequence: TTT
taaaactgttctctgaaata

SEQ ID NO: 82521 - DNA, 20 bp, Artificial Sequence
  Description of Artificial Sequence: Synthetic oligonucleotide
  Target: SCNA; (+) strand; PAM type: YTN; PAM sequence: TTT
aaaactgttctctgaaatag

SEQ ID NO: 82522 - DNA, 20 bp, Artificial Sequence
  Description of Artificial Sequence: Synthetic oligonucleotide
  Target: SCNA; (+) strand; PAM type: YTN; PAM sequence: TTA
aaactgttctctgaaataga

SEQ ID NO: 82523 - DNA, 20 bp, Artificial Sequence
  Description of Artificial Sequence: Synthetic oligonucleotide
  Target: SCNA; (+) strand; PAM type: YTN; PAM sequence: CTG
ttctctgaaatagaattatg

SEQ ID NO: 82524 - DNA, 20 bp, Artificial Sequence
  Description of Artificial Sequence: Synthetic oligonucleotide
  Target: SCNA; (+) strand; PAM type: YTN; PAM sequence: TTC
tctgaaatagaattatgtag

SEQ ID NO: 82525 - DNA, 20 bp, Artificial Sequence
  Description of Artificial Sequence: Synthetic oligonucleotide
  Target: SCNA; (+) strand; PAM type: YTN; PAM sequence: CTC
tgaaatagaattatgtaggt

SEQ ID NO: 82526 - DNA, 20 bp, Artificial Sequence
  Description of Artificial Sequence: Synthetic oligonucleotide
  Target: SCNA; (+) strand; PAM type: YTN; PAM sequence: CTG
aaatagaattatgtaggtac

SEQ ID NO: 82527 - DNA, 20 bp, Artificial Sequence
  Description of Artificial Sequence: Synthetic oligonucleotide
  Target: SCNA; (+) strand; PAM type: YTN; PAM sequence: TTA
tgtaggtacagaaacattca

SEQ ID NO: 82528 - DNA, 20 bp, Artificial Sequence
  Description of Artificial Sequence: Synthetic oligonucleotide
  Target: SCNA; (+) strand; PAM type: YTN; PAM sequence: TTC
atttttaaaaagtcataaat

SEQ ID NO: 82529 - DNA, 20 bp, Artificial Sequence
  Description of Artificial Sequence: Synthetic oligonucleotide
  Target: SCNA; (+) strand; PAM type: YTN; PAM sequence: TTT
ttaaaaagtcataaatatta

SEQ ID NO: 82530 - DNA, 20 bp, Artificial Sequence
  Description of Artificial Sequence: Synthetic oligonucleotide
  Target: SCNA; (+) strand; PAM type: YTN; PAM sequence: TTT
taaaaagtcataaatattag

SEQ ID NO: 82531 - DNA, 20 bp, Artificial Sequence
  Description of Artificial Sequence: Synthetic oligonucleotide
  Target: SCNA; (+) strand; PAM type: YTN; PAM sequence: TTT
aaaaagtcataaatattagg

SEQ ID NO: 82532 - DNA, 20 bp, Artificial Sequence
  Description of Artificial Sequence: Synthetic oligonucleotide
  Target: SCNA; (+) strand; PAM type: YTN; PAM sequence: TTA
aaaagtcataaatattaggg

SEQ ID NO: 82533 - DNA, 20 bp, Artificial Sequence
  Description of Artificial Sequence: Synthetic oligonucleotide
  Target: SCNA; (+) strand; PAM type: YTN; PAM sequence: TTA
gggcaaaattaaaaatctgg

SEQ ID NO: 82534 - DNA, 20 bp, Artificial Sequence
  Description of Artificial Sequence: Synthetic oligonucleotide
  Target: SCNA; (+) strand; PAM type: YTN; PAM sequence: TTA
aaaatctggaaaagcaaaca

SEQ ID NO: 82535 - DNA, 20 bp, Artificial Sequence
  Description of Artificial Sequence: Synthetic oligonucleotide
  Target: SCNA; (+) strand; PAM type: YTN; PAM sequence: CTG
gaaaagcaaacagtcgcatt

SEQ ID NO: 82536 - DNA, 20 bp, Artificial Sequence
  Description of Artificial Sequence: Synthetic oligonucleotide
  Target: SCNA; (+) strand; PAM type: YTN; PAM sequence: TTT
tttactattagctcaaatac

SEQ ID NO: 82537 - DNA, 20 bp, Artificial Sequence
  Description of Artificial Sequence: Synthetic oligonucleotide
  Target: SCNA; (+) strand; PAM type: YTN; PAM sequence: TTT
ttactattagctcaaataca

SEQ ID NO: 82538 - DNA, 20 bp, Artificial Sequence
  Description of Artificial Sequence: Synthetic oligonucleotide
  Target: SCNA; (+) strand; PAM type: YTN; PAM sequence: TTT
tactattagctcaaatacac

SEQ ID NO: 82539 - DNA, 20 bp, Artificial Sequence
  Description of Artificial Sequence: Synthetic oligonucleotide
  Target: SCNA; (+) strand; PAM type: YTN; PAM sequence: TTT
actattagctcaaatacaca

SEQ ID NO: 82540 - DNA, 20 bp, Artificial Sequence
  Description of Artificial Sequence: Synthetic oligonucleotide
  Target: SCNA; (+) strand; PAM type: YTN; PAM sequence: TTA
ctattagctcaaatacacac

SEQ ID NO: 82541 - DNA, 20 bp, Artificial Sequence
  Description of Artificial Sequence: Synthetic oligonucleotide
  Target: SCNA; (+) strand; PAM type: YTN; PAM sequence: CTA
ttagctcaaatacacacgtt

SEQ ID NO: 82542 - DNA, 20 bp, Artificial Sequence
  Description of Artificial Sequence: Synthetic oligonucleotide
  Target: SCNA; (+) strand; PAM type: YTN; PAM sequence: TTA
gctcaaatacacacgttcac

SEQ ID NO: 82543 - DNA, 20 bp, Artificial Sequence
  Description of Artificial Sequence: Synthetic oligonucleotide
  Target: SCNA; (+) strand; PAM type: YTN; PAM sequence: CTC
aaatacacacgttcacattc

SEQ ID NO: 82544 - DNA, 20 bp, Artificial Sequence
  Description of Artificial Sequence: Synthetic oligonucleotide
  Target: SCNA; (+) strand; PAM type: YTN; PAM sequence: TTC
acattcacctacctacacat

SEQ ID NO: 82545 - DNA, 20 bp, Artificial Sequence
  Description of Artificial Sequence: Synthetic oligonucleotide
  Target: SCNA; (+) strand; PAM type: YTN; PAM sequence: TTC
acctacctacacatacctct

SEQ ID NO: 82546 - DNA, 20 bp, Artificial Sequence
  Description of Artificial Sequence: Synthetic oligonucleotide
  Target: SCNA; (+) strand; PAM type: YTN; PAM sequence: CTA
cctacacatacctctgactc

SEQ ID NO: 82547 - DNA, 20 bp, Artificial Sequence
  Description of Artificial Sequence: Synthetic oligonucleotide
  Target: SCNA; (+) strand; PAM type: YTN; PAM sequence: CTA
cacatacctctgactcagtc

SEQ ID NO: 82548 - DNA, 20 bp, Artificial Sequence
  Description of Artificial Sequence: Synthetic oligonucleotide
  Target: SCNA; (+) strand; PAM type: YTN; PAM sequence: CTC
tgactcagtccacctttttg

SEQ ID NO: 82549 - DNA, 20 bp, Artificial Sequence
  Description of Artificial Sequence: Synthetic oligonucleotide
  Target: SCNA; (+) strand; PAM type: YTN; PAM sequence: CTG
actcagtccacctttttgac

SEQ ID NO: 82550 - DNA, 20 bp, Artificial Sequence
  Description of Artificial Sequence: Synthetic oligonucleotide
  Target: SCNA; (+) strand; PAM type: YTN; PAM sequence: CTC
agtccacctttttgacaagc

SEQ ID NO: 82551 - DNA, 20 bp, Artificial Sequence
  Description of Artificial Sequence: Synthetic oligonucleotide
  Target: SCNA; (+) strand; PAM type: YTN; PAM sequence: CTT
tttgacaagcaatgatgcaa

SEQ ID NO: 82552 - DNA, 20 bp, Artificial Sequence
  Description of Artificial Sequence: Synthetic oligonucleotide
  Target: SCNA; (+) strand; PAM type: YTN; PAM sequence: TTT
ttgacaagcaatgatgcaaa

SEQ ID NO: 82553 - DNA, 20 bp, Artificial Sequence
  Description of Artificial Sequence: Synthetic oligonucleotide
  Target: SCNA; (+) strand; PAM type: YTN; PAM sequence: TTT
tgacaagcaatgatgcaaaa

SEQ ID NO: 82554 - DNA, 20 bp, Artificial Sequence
  Description of Artificial Sequence: Synthetic oligonucleotide
  Target: SCNA; (+) strand; PAM type: YTN; PAM sequence: TTT
gacaagcaatgatgcaaaaa

SEQ ID NO: 82555 - DNA, 20 bp, Artificial Sequence
  Description of Artificial Sequence: Synthetic oligonucleotide
  Target: SCNA; (+) strand; PAM type: YTN; PAM sequence: TTG
acaagcaatgatgcaaaaat

SEQ ID NO: 82556 - DNA, 20 bp, Artificial Sequence
  Description of Artificial Sequence: Synthetic oligonucleotide
  Target: SCNA; (+) strand; PAM type: YTN; PAM sequence: CTA
ccagcatttagagtattgat

SEQ ID NO: 82557 - DNA, 20 bp, Artificial Sequence
  Description of Artificial Sequence: Synthetic oligonucleotide
  Target: SCNA; (+) strand; PAM type: YTN; PAM sequence: TTT
agagtattgattatcctaac

SEQ ID NO: 82558 - DNA, 20 bp, Artificial Sequence
  Description of Artificial Sequence: Synthetic oligonucleotide
  Target: SCNA; (+) strand; PAM type: YTN; PAM sequence: TTA
gagtattgattatcctaacc

SEQ ID NO: 82559 - DNA, 20 bp, Artificial Sequence
  Description of Artificial Sequence: Synthetic oligonucleotide
  Target: SCNA; (+) strand; PAM type: YTN; PAM sequence: TTG
attatcctaacccatcactc

SEQ ID NO: 82560 - DNA, 20 bp, Artificial Sequence
  Description of Artificial Sequence: Synthetic oligonucleotide
  Target: SCNA; (+) strand; PAM type: YTN; PAM sequence: TTA
tcctaacccatcactcatga

SEQ ID NO: 82561 - DNA, 20 bp, Artificial Sequence
  Description of Artificial Sequence: Synthetic oligonucleotide
  Target: SCNA; (+) strand; PAM type: YTN; PAM sequence: CTA
acccatcactcatgaacaag

SEQ ID NO: 82562 - DNA, 20 bp, Artificial Sequence
  Description of Artificial Sequence: Synthetic oligonucleotide
  Target: SCNA; (+) strand; PAM type: YTN; PAM sequence: CTC
atgaacaagcaccaaactga

SEQ ID NO: 82563 - DNA, 20 bp, Artificial Sequence
  Description of Artificial Sequence: Synthetic oligonucleotide
  Target: SCNA; (+) strand; PAM type: YTN; PAM sequence: CTG
acatttggggtttacctacc

SEQ ID NO: 82564 - DNA, 20 bp, Artificial Sequence
  Description of Artificial Sequence: Synthetic oligonucleotide
  Target: SCNA; (+) strand; PAM type: YTN; PAM sequence: TTT
ggggtttacctacctacata

SEQ ID NO: 82565 - DNA, 20 bp, Artificial Sequence
  Description of Artificial Sequence: Synthetic oligonucleotide
  Target: SCNA; (+) strand; PAM type: YTN; PAM sequence: TTG
gggtttacctacctacatag

SEQ ID NO: 82566 - DNA, 20 bp, Artificial Sequence
  Description of Artificial Sequence: Synthetic oligonucleotide
  Target: SCNA; (+) strand; PAM type: YTN; PAM sequence: TTT
acctacctacatagagaaca

SEQ ID NO: 82567 - DNA, 20 bp, Artificial Sequence
  Description of Artificial Sequence: Synthetic oligonucleotide
  Target: SCNA; (+) strand; PAM type: YTN; PAM sequence: TTA
cctacctacatagagaacac

SEQ ID NO: 82568 - DNA, 20 bp, Artificial Sequence
  Description of Artificial Sequence: Synthetic oligonucleotide
  Target: SCNA; (+) strand; PAM type: YTN; PAM sequence: CTA
cctacatagagaacaccctc

SEQ ID NO: 82569 - DNA, 20 bp, Artificial Sequence
  Description of Artificial Sequence: Synthetic oligonucleotide
  Target: SCNA; (+) strand; PAM type: YTN; PAM sequence: CTA
catagagaacaccctctttt

SEQ ID NO: 82570 - DNA, 20 bp, Artificial Sequence
  Description of Artificial Sequence: Synthetic oligonucleotide
  Target: SCNA; (+) strand; PAM type: YTN; PAM sequence: CTC
ttttgtctttcctgctgctt

SEQ ID NO: 82571 - DNA, 20 bp, Artificial Sequence
  Description of Artificial Sequence: Synthetic oligonucleotide
  Target: SCNA; (+) strand; PAM type: YTN; PAM sequence: CTT
ttgtctttcctgctgcttct

SEQ ID NO: 82572 - DNA, 20 bp, Artificial Sequence
  Description of Artificial Sequence: Synthetic oligonucleotide
  Target: SCNA; (+) strand; PAM type: YTN; PAM sequence: TTT
tgtctttcctgctgcttctg

SEQ ID NO: 82573 - DNA, 20 bp, Artificial Sequence
  Description of Artificial Sequence: Synthetic oligonucleotide
  Target: SCNA; (+) strand; PAM type: YTN; PAM sequence: TTT
gtctttcctgctgcttctgc

SEQ ID NO: 82574 - DNA, 20 bp, Artificial Sequence
  Description of Artificial Sequence: Synthetic oligonucleotide
  Target: SCNA; (+) strand; PAM type: YTN; PAM sequence: TTG
tctttcctgctgcttctgcc

SEQ ID NO: 82575 - DNA, 20 bp, Artificial Sequence
  Description of Artificial Sequence: Synthetic oligonucleotide
  Target: SCNA; (+) strand; PAM type: YTN; PAM sequence: CTT
tcctgctgcttctgccacac

SEQ ID NO: 82576 - DNA, 20 bp, Artificial Sequence
  Description of Artificial Sequence: Synthetic oligonucleotide
  Target: SCNA; (+) strand; PAM type: YTN; PAM sequence: TTT
cctgctgcttctgccacacc

SEQ ID NO: 82577 - DNA, 20 bp, Artificial Sequence
  Description of Artificial Sequence: Synthetic oligonucleotide
  Target: SCNA; (+) strand; PAM type: YTN; PAM sequence: TTC
ctgctgcttctgccacaccc

SEQ ID NO: 82578 - DNA, 20 bp, Artificial Sequence
  Description of Artificial Sequence: Synthetic oligonucleotide
  Target: SCNA; (+) strand; PAM type: YTN; PAM sequence: CTG
ctgcttctgccacaccctgt

SEQ ID NO: 82579 - DNA, 20 bp, Artificial Sequence
  Description of Artificial Sequence: Synthetic oligonucleotide
  Target: SCNA; (+) strand; PAM type: YTN; PAM sequence: CTG
cttctgccacaccctgtttg

SEQ ID NO: 82580 - DNA, 20 bp, Artificial Sequence
  Description of Artificial Sequence: Synthetic oligonucleotide
  Target: SCNA; (+) strand; PAM type: YTN; PAM sequence: CTT
ctgccacaccctgtttggtt

SEQ ID NO: 82581 - DNA, 20 bp, Artificial Sequence
  Description of Artificial Sequence: Synthetic oligonucleotide
  Target: SCNA; (+) strand; PAM type: YTN; PAM sequence: TTC
tgccacaccctgtttggttt

SEQ ID NO: 82582 - DNA, 20 bp, Artificial Sequence
  Description of Artificial Sequence: Synthetic oligonucleotide
  Target: SCNA; (+) strand; PAM type: YTN; PAM sequence: CTG
ccacaccctgtttggttttc

SEQ ID NO: 82583 - DNA, 20 bp, Artificial Sequence
  Description of Artificial Sequence: Synthetic oligonucleotide
  Target: SCNA; (+) strand; PAM type: YTN; PAM sequence: CTG
tttggttttctcagcagcag

SEQ ID NO: 82584 - DNA, 20 bp, Artificial Sequence
  Description of Artificial Sequence: Synthetic oligonucleotide
  Target: SCNA; (+) strand; PAM type: YTN; PAM sequence: TTT
ggttttctcagcagcagcca

SEQ ID NO: 82585 - DNA, 20 bp, Artificial Sequence
  Description of Artificial Sequence: Synthetic oligonucleotide
  Target: SCNA; (+) strand; PAM type: YTN; PAM sequence: TTG
gttttctcagcagcagccac

SEQ ID NO: 82586 - DNA, 20 bp, Artificial Sequence
  Description of Artificial Sequence: Synthetic oligonucleotide
  Target: SCNA; (+) strand; PAM type: YTN; PAM sequence: TTT
tctcagcagcagccacaact

SEQ ID NO: 82587 - DNA, 20 bp, Artificial Sequence
  Description of Artificial Sequence: Synthetic oligonucleotide
  Target: SCNA; (+) strand; PAM type: YTN; PAM sequence: TTT
ctcagcagcagccacaactc

SEQ ID NO: 82588 - DNA, 20 bp, Artificial Sequence
  Description of Artificial Sequence: Synthetic oligonucleotide
  Target: SCNA; (+) strand; PAM type: YTN; PAM sequence: TTC
tcagcagcagccacaactcc

SEQ ID NO: 82589 - DNA, 20 bp, Artificial Sequence
  Description of Artificial Sequence: Synthetic oligonucleotide
  Target: SCNA; (+) strand; PAM type: YTN; PAM sequence: CTC
agcagcagccacaactccct

SEQ ID NO: 82590 - DNA, 20 bp, Artificial Sequence
  Description of Artificial Sequence: Synthetic oligonucleotide
  Target: SCNA; (+) strand; PAM type: YTN; PAM sequence: CTC
cctccttggcctttgaaagt

SEQ ID NO: 82591 - DNA, 20 bp, Artificial Sequence
  Description of Artificial Sequence: Synthetic oligonucleotide
  Target: SCNA; (+) strand; PAM type: YTN; PAM sequence: CTC
cttggcctttgaaagtcctt

SEQ ID NO: 82592 - DNA, 20 bp, Artificial Sequence
  Description of Artificial Sequence: Synthetic oligonucleotide
  Target: SCNA; (+) strand; PAM type: YTN; PAM sequence: CTT
ggcctttgaaagtcctttca

SEQ ID NO: 82593 - DNA, 20 bp, Artificial Sequence
  Description of Artificial Sequence: Synthetic oligonucleotide
  Target: SCNA; (+) strand; PAM type: YTN; PAM sequence: TTG
gcctttgaaagtcctttcat

SEQ ID NO: 82594 - DNA, 20 bp, Artificial Sequence
  Description of Artificial Sequence: Synthetic oligonucleotide
  Target: SCNA; (+) strand; PAM type: YTN; PAM sequence: CTT
tgaaagtcctttcatgaata

SEQ ID NO: 82595 - DNA, 20 bp, Artificial Sequence
  Description of Artificial Sequence: Synthetic oligonucleotide
  Target: SCNA; (+) strand; PAM type: YTN; PAM sequence: TTT
gaaagtcctttcatgaatac

SEQ ID NO: 82596 - DNA, 20 bp, Artificial Sequence
  Description of Artificial Sequence: Synthetic oligonucleotide
  Target: SCNA; (+) strand; PAM type: YTN; PAM sequence: TTG
aaagtcctttcatgaataca

SEQ ID NO: 82597 - DNA, 20 bp, Artificial Sequence
  Description of Artificial Sequence: Synthetic oligonucleotide
  Target: SCNA; (+) strand; PAM type: YTN; PAM sequence: CTT
tcatgaatacatccatggct

SEQ ID NO: 82598 - DNA, 20 bp, Artificial Sequence
  Description of Artificial Sequence: Synthetic oligonucleotide
  Target: SCNA; (+) strand; PAM type: YTN; PAM sequence: TTT
catgaatacatccatggcta

SEQ ID NO: 82599 - DNA, 20 bp, Artificial Sequence
  Description of Artificial Sequence: Synthetic oligonucleotide
  Target: SCNA; (+) strand; PAM type: YTN; PAM sequence: TTC
atgaatacatccatggctaa

SEQ ID NO: 82600 - DNA, 20 bp, Artificial Sequence
  Description of Artificial Sequence: Synthetic oligonucleotide
  Target: SCNA; (+) strand; PAM type: YTN; PAM sequence: CTA
atgaattcctttacaccaca

SEQ ID NO: 82601 - DNA, 20 bp, Artificial Sequence
  Description of Artificial Sequence: Synthetic oligonucleotide
  Target: SCNA; (+) strand; PAM type: YTN; PAM sequence: TTC
ctttacaccacactggaaaa

SEQ ID NO: 82602 - DNA, 20 bp, Artificial Sequence
  Description of Artificial Sequence: Synthetic oligonucleotide
  Target: SCNA; (+) strand; PAM type: YTN; PAM sequence: CTT
tacaccacactggaaaacat

SEQ ID NO: 82603 - DNA, 20 bp, Artificial Sequence
  Description of Artificial Sequence: Synthetic oligonucleotide
  Target: SCNA; (+) strand; PAM type: YTN; PAM sequence: TTT
acaccacactggaaaacata

SEQ ID NO: 82604 - DNA, 20 bp, Artificial Sequence
  Description of Artificial Sequence: Synthetic oligonucleotide
  Target: SCNA; (+) strand; PAM type: YTN; PAM sequence: TTA
caccacactggaaaacataa

SEQ ID NO: 82605 - DNA, 20 bp, Artificial Sequence
  Description of Artificial Sequence: Synthetic oligonucleotide
  Target: SCNA; (+) strand; PAM type: YTN; PAM sequence: CTG
gaaaacataaaatacacttt

SEQ ID NO: 82606 - DNA, 20 bp, Artificial Sequence
  Description of Artificial Sequence: Synthetic oligonucleotide
  Target: SCNA; (+) strand; PAM type: YTN; PAM sequence: CTT
tgaatgagaactttcgggga

SEQ ID NO: 82607 - DNA, 20 bp, Artificial Sequence
  Description of Artificial Sequence: Synthetic oligonucleotide
  Target: SCNA; (+) strand; PAM type: YTN; PAM sequence: TTT
gaatgagaactttcggggaa

SEQ ID NO: 82608 - DNA, 20 bp, Artificial Sequence
  Description of Artificial Sequence: Synthetic oligonucleotide
  Target: SCNA; (+) strand; PAM type: YTN; PAM sequence: TTG
aatgagaactttcggggaaa

SEQ ID NO: 82609 - DNA, 20 bp, Artificial Sequence
  Description of Artificial Sequence: Synthetic oligonucleotide
  Target: SCNA; (+) strand; PAM type: YTN; PAM sequence: CTT
tcggggaaaaataaacaaaa

SEQ ID NO: 82610 - DNA, 20 bp, Artificial Sequence
  Description of Artificial Sequence: Synthetic oligonucleotide
  Target: SCNA; (+) strand; PAM type: YTN; PAM sequence: TTT
cggggaaaaataaacaaaaa

SEQ ID NO: 82611 - DNA, 20 bp, Artificial Sequence
  Description of Artificial Sequence: Synthetic oligonucleotide
  Target: SCNA; (+) strand; PAM type: YTN; PAM sequence: TTC
ggggaaaaataaacaaaaaa

SEQ ID NO: 82612 - DNA, 20 bp, Artificial Sequence
  Description of Artificial Sequence: Synthetic oligonucleotide
  Target: SCNA; (+) strand; PAM type: YTN; PAM sequence: CTG
aaaaatcatgagaaaccctc

SEQ ID NO: 82613 - DNA, 20 bp, Artificial Sequence
  Description of Artificial Sequence: Synthetic oligonucleotide
  Target: SCNA; (+) strand; PAM type: YTN; PAM sequence: CTC
caaagtgtgagactctttta

SEQ ID NO: 82614 - DNA, 20 bp, Artificial Sequence
  Description of Artificial Sequence: Synthetic oligonucleotide
  Target: SCNA; (+) strand; PAM type: YTN; PAM sequence: CTC
ttttaagtgtacactcattt

SEQ ID NO: 82615 - DNA, 20 bp, Artificial Sequence
  Description of Artificial Sequence: Synthetic oligonucleotide
  Target: SCNA; (+) strand; PAM type: YTN; PAM sequence: CTT
ttaagtgtacactcatttaa

SEQ ID NO: 82616 - DNA, 20 bp, Artificial Sequence
  Description of Artificial Sequence: Synthetic oligonucleotide
  Target: SCNA; (+) strand; PAM type: YTN; PAM sequence: TTT
taagtgtacactcatttaac

SEQ ID NO: 82617 - DNA, 20 bp, Artificial Sequence
  Description of Artificial Sequence: Synthetic oligonucleotide
  Target: SCNA; (+) strand; PAM type: YTN; PAM sequence: TTT
aagtgtacactcatttaacc

SEQ ID NO: 82618 - DNA, 20 bp, Artificial Sequence
  Description of Artificial Sequence: Synthetic oligonucleotide
  Target: SCNA; (+) strand; PAM type: YTN; PAM sequence: TTA
agtgtacactcatttaacca

SEQ ID NO: 82619 - DNA, 20 bp, Artificial Sequence
  Description of Artificial Sequence: Synthetic oligonucleotide
  Target: SCNA; (+) strand; PAM type: YTN; PAM sequence: CTC
atttaaccattggacaaagc

SEQ ID NO: 82620 - DNA, 20 bp, Artificial Sequence
  Description of Artificial Sequence: Synthetic oligonucleotide
  Target: SCNA; (+) strand; PAM type: YTN; PAM sequence: TTT
aaccattggacaaagcagac

SEQ ID NO: 82621 - DNA, 20 bp, Artificial Sequence
  Description of Artificial Sequence: Synthetic oligonucleotide
  Target: SCNA; (+) strand; PAM type: YTN; PAM sequence: TTA
accattggacaaagcagaca

SEQ ID NO: 82622 - DNA, 20 bp, Artificial Sequence
  Description of Artificial Sequence: Synthetic oligonucleotide
  Target: SCNA; (+) strand; PAM type: YTN; PAM sequence: TTG
gacaaagcagacatttttag

SEQ ID NO: 82623 - DNA, 20 bp, Artificial Sequence
  Description of Artificial Sequence: Synthetic oligonucleotide
  Target: SCNA; (+) strand; PAM type: YTN; PAM sequence: TTT
ttagctctggcattaaaaat

SEQ ID NO: 82624 - DNA, 20 bp, Artificial Sequence
  Description of Artificial Sequence: Synthetic oligonucleotide
  Target: SCNA; (+) strand; PAM type: YTN; PAM sequence: TTT
tagctctggcattaaaaatt

SEQ ID NO: 82625 - DNA, 20 bp, Artificial Sequence
  Description of Artificial Sequence: Synthetic oligonucleotide
  Target: SCNA; (+) strand; PAM type: YTN; PAM sequence: TTT
agctctggcattaaaaattt

SEQ ID NO: 82626 - DNA, 20 bp, Artificial Sequence
  Description of Artificial Sequence: Synthetic oligonucleotide
  Target: SCNA; (+) strand; PAM type: YTN; PAM sequence: TTA
gctctggcattaaaaattta

SEQ ID NO: 82627 - DNA, 20 bp, Artificial Sequence
  Description of Artificial Sequence: Synthetic oligonucleotide
  Target: SCNA; (+) strand; PAM type: YTN; PAM sequence: CTC
tggcattaaaaatttagcat

SEQ ID NO: 82628 - DNA, 20 bp, Artificial Sequence
  Description of Artificial Sequence: Synthetic oligonucleotide
  Target: SCNA; (+) strand; PAM type: YTN; PAM sequence: CTG
gcattaaaaatttagcatct

SEQ ID NO: 82629 - DNA, 20 bp, Artificial Sequence
  Description of Artificial Sequence: Synthetic oligonucleotide
  Target: SCNA; (+) strand; PAM type: YTN; PAM sequence: TTA
aaaatttagcatctcccatc

SEQ ID NO: 82630 - DNA, 20 bp, Artificial Sequence
  Description of Artificial Sequence: Synthetic oligonucleotide
  Target: SCNA; (+) strand; PAM type: YTN; PAM sequence: TTT
agcatctcccatccatcttg

SEQ ID NO: 82631 - DNA, 20 bp, Artificial Sequence
  Description of Artificial Sequence: Synthetic oligonucleotide
  Target: SCNA; (+) strand; PAM type: YTN; PAM sequence: TTA
gcatctcccatccatcttgg

SEQ ID NO: 82632 - DNA, 20 bp, Artificial Sequence
  Description of Artificial Sequence: Synthetic oligonucleotide
  Target: SCNA; (+) strand; PAM type: YTN; PAM sequence: CTC
ccatccatcttggctagtaa

SEQ ID NO: 82633 - DNA, 20 bp, Artificial Sequence
  Description of Artificial Sequence: Synthetic oligonucleotide
  Target: SCNA; (+) strand; PAM type: YTN; PAM sequence: CTT
ggctagtaaaagtctagcca

SEQ ID NO: 82634 - DNA, 20 bp, Artificial Sequence
  Description of Artificial Sequence: Synthetic oligonucleotide
  Target: SCNA; (+) strand; PAM type: YTN; PAM sequence: TTG
gctagtaaaagtctagccac

SEQ ID NO: 82635 - DNA, 20 bp, Artificial Sequence
  Description of Artificial Sequence: Synthetic oligonucleotide
  Target: SCNA; (+) strand; PAM type: YTN; PAM sequence: CTA
gtaaaagtctagccacctaa

SEQ ID NO: 82636 - DNA, 20 bp, Artificial Sequence
  Description of Artificial Sequence: Synthetic oligonucleotide
  Target: SCNA; (+) strand; PAM type: YTN; PAM sequence: CTA
gccacctaaccacggattag

SEQ ID NO: 82637 - DNA, 20 bp, Artificial Sequence
  Description of Artificial Sequence: Synthetic oligonucleotide
  Target: SCNA; (+) strand; PAM type: YTN; PAM sequence: CTA
accacggattaggatgaatc

SEQ ID NO: 82638 - DNA, 20 bp, Artificial Sequence
  Description of Artificial Sequence: Synthetic oligonucleotide
  Target: SCNA; (+) strand; PAM type: YTN; PAM sequence: TTA
ggatgaatcctctgagttgt

SEQ ID NO: 82639 - DNA, 20 bp, Artificial Sequence
  Description of Artificial Sequence: Synthetic oligonucleotide
  Target: SCNA; (+) strand; PAM type: YTN; PAM sequence: CTC
tgagttgttattactgcatt

SEQ ID NO: 82640 - DNA, 20 bp, Artificial Sequence
  Description of Artificial Sequence: Synthetic oligonucleotide
  Target: SCNA; (+) strand; PAM type: YTN; PAM sequence: CTG
agttgttattactgcatttc

SEQ ID NO: 82641 - DNA, 20 bp, Artificial Sequence
  Description of Artificial Sequence: Synthetic oligonucleotide
  Target: SCNA; (+) strand; PAM type: YTN; PAM sequence: TTG
ttattactgcatttcagaag

SEQ ID NO: 82642 - DNA, 20 bp, Artificial Sequence
  Description of Artificial Sequence: Synthetic oligonucleotide
  Target: SCNA; (+) strand; PAM type: YTN; PAM sequence: TTA
ttactgcatttcagaagtgg

SEQ ID NO: 82643 - DNA, 20 bp, Artificial Sequence
  Description of Artificial Sequence: Synthetic oligonucleotide
  Target: SCNA; (+) strand; PAM type: YTN; PAM sequence: TTA
ctgcatttcagaagtggagt

SEQ ID NO: 82644 - DNA, 20 bp, Artificial Sequence
  Description of Artificial Sequence: Synthetic oligonucleotide
  Target: SCNA; (+) strand; PAM type: YTN; PAM sequence: CTG
catttcagaagtggagttgc

SEQ ID NO: 82645 - DNA, 20 bp, Artificial Sequence
  Description of Artificial Sequence: Synthetic oligonucleotide
  Target: SCNA; (+) strand; PAM type: YTN; PAM sequence: TTT
cagaagtggagttgcatgaa

SEQ ID NO: 82646 - DNA, 20 bp, Artificial Sequence
  Description of Artificial Sequence: Synthetic oligonucleotide
  Target: SCNA; (+) strand; PAM type: YTN; PAM sequence: TTC
agaagtggagttgcatgaaa

SEQ ID NO: 82647 - DNA, 20 bp, Artificial Sequence
  Description of Artificial Sequence: Synthetic oligonucleotide
  Target: SCNA; (+) strand; PAM type: YTN; PAM sequence: TTG
catgaaaagattaacccctt

SEQ ID NO: 82648 - DNA, 20 bp, Artificial Sequence
  Description of Artificial Sequence: Synthetic oligonucleotide
  Target: SCNA; (+) strand; PAM type: YTN; PAM sequence: TTA
accccttttttaaattcccg

SEQ ID NO: 82649 - DNA, 20 bp, Artificial Sequence
  Description of Artificial Sequence: Synthetic oligonucleotide
  Target: SCNA; (+) strand; PAM type: YTN; PAM sequence: CTT
ttttaaattcccggggtcta

SEQ ID NO: 82650 - DNA, 20 bp, Artificial Sequence
  Description of Artificial Sequence: Synthetic oligonucleotide
  Target: SCNA; (+) strand; PAM type: YTN; PAM sequence: TTT
tttaaattcccggggtctaa

SEQ ID NO: 82651 - DNA, 20 bp, Artificial Sequence
  Description of Artificial Sequence: Synthetic oligonucleotide
  Target: SCNA; (+) strand; PAM type: YTN; PAM sequence: TTT
ttaaattcccggggtctaaa

SEQ ID NO: 82652 - DNA, 20 bp, Artificial Sequence
  Description of Artificial Sequence: Synthetic oligonucleotide
  Target: SCNA; (+) strand; PAM type: YTN; PAM sequence: TTT
taaattcccggggtctaaag

SEQ ID NO: 82653 - DNA, 20 bp, Artificial Sequence
  Description of Artificial Sequence: Synthetic oligonucleotide
  Target: SCNA; (+) strand; PAM type: YTN; PAM sequence: TTT
aaattcccggggtctaaagg

SEQ ID NO: 82654 - DNA, 20 bp, Artificial Sequence
  Description of Artificial Sequence: Synthetic oligonucleotide
  Target: SCNA; (+) strand; PAM type: YTN; PAM sequence: TTA
aattcccggggtctaaaggg

SEQ ID NO: 82655 - DNA, 20 bp, Artificial Sequence
  Description of Artificial Sequence: Synthetic oligonucleotide
  Target: SCNA; (+) strand; PAM type: YTN; PAM sequence: TTC
ccggggtctaaagggtaaca

SEQ ID NO: 82656 - DNA, 20 bp, Artificial Sequence
  Description of Artificial Sequence: Synthetic oligonucleotide
  Target: SCNA; (+) strand; PAM type: YTN; PAM sequence: CTA
aagggtaacagtatgagtta

SEQ ID NO: 82657 - DNA, 20 bp, Artificial Sequence
  Description of Artificial Sequence: Synthetic oligonucleotide
  Target: SCNA; (+) strand; PAM type: YTN; PAM sequence: TTA
gaagcatggaagctggaggc

SEQ ID NO: 82658 - DNA, 20 bp, Artificial Sequence
  Description of Artificial Sequence: Synthetic oligonucleotide
  Target: SCNA; (+) strand; PAM type: YTN; PAM sequence: CTG
gaggcttagggtcaggggta

SEQ ID NO: 82659 - DNA, 20 bp, Artificial Sequence
  Description of Artificial Sequence: Synthetic oligonucleotide
  Target: SCNA; (+) strand; PAM type: YTN; PAM sequence: CTT
agggtcaggggtatccttaa

SEQ ID NO: 82660 - DNA, 20 bp, Artificial Sequence
  Description of Artificial Sequence: Synthetic oligonucleotide
  Target: SCNA; (+) strand; PAM type: YTN; PAM sequence: TTA
gggtcaggggtatccttaac

SEQ ID NO: 82661 - DNA, 20 bp, Artificial Sequence
  Description of Artificial Sequence: Synthetic oligonucleotide
  Target: SCNA; (+) strand; PAM type: YTN; PAM sequence: CTT
aacatgaatcccagaagaag

SEQ ID NO: 82662 - DNA, 20 bp, Artificial Sequence
  Description of Artificial Sequence: Synthetic oligonucleotide
  Target: SCNA; (+) strand; PAM type: YTN; PAM sequence: TTA
acatgaatcccagaagaagg

SEQ ID NO: 82663 - DNA, 20 bp, Artificial Sequence
  Description of Artificial Sequence: Synthetic oligonucleotide
  Target: SCNA; (+) strand; PAM type: YTN; PAM sequence: CTA
acaggttgatggtggaaagg

SEQ ID NO: 82664 - DNA, 20 bp, Artificial Sequence
  Description of Artificial Sequence: Synthetic oligonucleotide
  Target: SCNA; (+) strand; PAM type: YTN; PAM sequence: TTG
atggtggaaaggcgtaggca

SEQ ID NO: 82665 - DNA, 20 bp, Artificial Sequence
  Description of Artificial Sequence: Synthetic oligonucleotide
  Target: SCNA; (+) strand; PAM type: YTN; PAM sequence: CTA
actgctcactcggggtgtgg

SEQ ID NO: 82666 - DNA, 20 bp, Artificial Sequence
  Description of Artificial Sequence: Synthetic oligonucleotide
  Target: SCNA; (+) strand; PAM type: YTN; PAM sequence: CTG
ctcactcggggtgtggttca

SEQ ID NO: 82667 - DNA, 20 bp, Artificial Sequence
  Description of Artificial Sequence: Synthetic oligonucleotide
  Target: SCNA; (+) strand; PAM type: YTN; PAM sequence: CTC
actcggggtgtggttcaaac

SEQ ID NO: 82668 - DNA, 20 bp, Artificial Sequence
  Description of Artificial Sequence: Synthetic oligonucleotide
  Target: SCNA; (+) strand; PAM type: YTN; PAM sequence: CTC
ggggtgtggttcaaactcag

SEQ ID NO: 82669 - DNA, 20 bp, Artificial Sequence
  Description of Artificial Sequence: Synthetic oligonucleotide
  Target: SCNA; (+) strand; PAM type: YTN; PAM sequence: TTC
aaactcaggcaaacagcagg

SEQ ID NO: 82670 - DNA, 20 bp, Artificial Sequence
  Description of Artificial Sequence: Synthetic oligonucleotide
  Target: SCNA; (+) strand; PAM type: YTN; PAM sequence: CTC
aggcaaacagcaggcccaag

SEQ ID NO: 82671 - DNA, 20 bp, Artificial Sequence
  Description of Artificial Sequence: Synthetic oligonucleotide
  Target: SCNA; (+) strand; PAM type: YTN; PAM sequence: TTC
taatccatccaacatccacc

SEQ ID NO: 82672 - DNA, 20 bp, Artificial Sequence
  Description of Artificial Sequence: Synthetic oligonucleotide
  Target: SCNA; (+) strand; PAM type: YTN; PAM sequence: CTA
atccatccaacatccacccc

SEQ ID NO: 82673 - DNA, 20 bp, Artificial Sequence
  Description of Artificial Sequence: Synthetic oligonucleotide
  Target: SCNA; (+) strand; PAM type: YTN; PAM sequence: CTC
agctatctaccctgagcagg

SEQ ID NO: 82674 - DNA, 20 bp, Artificial Sequence
  Description of Artificial Sequence: Synthetic oligonucleotide
  Target: SCNA; (+) strand; PAM type: YTN; PAM sequence: CTA
tctaccctgagcaggcgccg

SEQ ID NO: 82675 - DNA, 20 bp, Artificial Sequence
  Description of Artificial Sequence: Synthetic oligonucleotide
  Target: SCNA; (+) strand; PAM type: YTN; PAM sequence: CTA
ccctgagcaggcgccgctca

SEQ ID NO: 82676 - DNA, 20 bp, Artificial Sequence
  Description of Artificial Sequence: Synthetic oligonucleotide
  Target: SCNA; (+) strand; PAM type: YTN; PAM sequence: CTG
agcaggcgccgctcacactc

SEQ ID NO: 82677 - DNA, 20 bp, Artificial Sequence
  Description of Artificial Sequence: Synthetic oligonucleotide
  Target: SCNA; (+) strand; PAM type: YTN; PAM sequence: CTC
acactcgcgggccgtctcca

SEQ ID NO: 82678 - DNA, 20 bp, Artificial Sequence
  Description of Artificial Sequence: Synthetic oligonucleotide
  Target: SCNA; (+) strand; PAM type: YTN; PAM sequence: CTC
gcgggccgtctccaaccccg

SEQ ID NO: 82679 - DNA, 20 bp, Artificial Sequence
  Description of Artificial Sequence: Synthetic oligonucleotide
  Target: SCNA; (+) strand; PAM type: YTN; PAM sequence: CTC
caaccccgcgccagccaccc

SEQ ID NO: 82680 - DNA, 20 bp, Artificial Sequence
  Description of Artificial Sequence: Synthetic oligonucleotide
  Target: SCNA; (+) strand; PAM type: YTN; PAM sequence: TTC
tcagcctccaccctagcgga

SEQ ID NO: 82681 - DNA, 20 bp, Artificial Sequence
  Description of Artificial Sequence: Synthetic oligonucleotide
  Target: SCNA; (+) strand; PAM type: YTN; PAM sequence: CTC
agcctccaccctagcggacc

SEQ ID NO: 82682 - DNA, 20 bp, Artificial Sequence
  Description of Artificial Sequence: Synthetic oligonucleotide
  Target: SCNA; (+) strand; PAM type: YTN; PAM sequence: CTC
caccctagcggaccccgcgc

SEQ ID NO: 82683 - DNA, 20 bp, Artificial Sequence
  Description of Artificial Sequence: Synthetic oligonucleotide
  Target: SCNA; (+) strand; PAM type: YTN; PAM sequence: CTA
gcggaccccgcgccagcact

SEQ ID NO: 82684 - DNA, 20 bp, Artificial Sequence
  Description of Artificial Sequence: Synthetic oligonucleotide
  Target: SCNA; (+) strand; PAM type: YTN; PAM sequence: CTT
gttaacccgttaccacctgt

SEQ ID NO: 82685 - DNA, 20 bp, Artificial Sequence
  Description of Artificial Sequence: Synthetic oligonucleotide
  Target: SCNA; (+) strand; PAM type: YTN; PAM sequence: TTG
ttaacccgttaccacctgtt

SEQ ID NO: 82686 - DNA, 20 bp, Artificial Sequence
  Description of Artificial Sequence: Synthetic oligonucleotide
  Target: SCNA; (+) strand; PAM type: YTN; PAM sequence: TTA
acccgttaccacctgttgac

SEQ ID NO: 82687 - DNA, 20 bp, Artificial Sequence
  Description of Artificial Sequence: Synthetic oligonucleotide
  Target: SCNA; (+) strand; PAM type: YTN; PAM sequence: TTA
ccacctgttgacttggcctc

SEQ ID NO: 82688 - DNA, 20 bp, Artificial Sequence
  Description of Artificial Sequence: Synthetic oligonucleotide
  Target: SCNA; (+) strand; PAM type: YTN; PAM sequence: CTG
ttgacttggcctccttgcac

SEQ ID NO: 82689 - DNA, 20 bp, Artificial Sequence
  Description of Artificial Sequence: Synthetic oligonucleotide
  Target: SCNA; (+) strand; PAM type: YTN; PAM sequence: TTG
acttggcctccttgcacttc

SEQ ID NO: 82690 - DNA, 20 bp, Artificial Sequence
  Description of Artificial Sequence: Synthetic oligonucleotide
  Target: SCNA; (+) strand; PAM type: YTN; PAM sequence: CTT
ggcctccttgcacttccatt

SEQ ID NO: 82691 - DNA, 20 bp, Artificial Sequence
  Description of Artificial Sequence: Synthetic oligonucleotide
  Target: SCNA; (+) strand; PAM type: YTN; PAM sequence: TTG
gcctccttgcacttccattt

SEQ ID NO: 82692 - DNA, 20 bp, Artificial Sequence
  Description of Artificial Sequence: Synthetic oligonucleotide
  Target: SCNA; (+) strand; PAM type: YTN; PAM sequence: CTC
cttgcacttccatttcatta

SEQ ID NO: 82693 - DNA, 20 bp, Artificial Sequence
  Description of Artificial Sequence: Synthetic oligonucleotide
  Target: SCNA; (+) strand; PAM type: YTN; PAM sequence: CTT
gcacttccatttcattattt

SEQ ID NO: 82694 - DNA, 20 bp, Artificial Sequence
  Description of Artificial Sequence: Synthetic oligonucleotide
  Target: SCNA; (+) strand; PAM type: YTN; PAM sequence: TTG
cacttccatttcattatttg

SEQ ID NO: 82695 - DNA, 20 bp, Artificial Sequence
  Description of Artificial Sequence: Synthetic oligonucleotide
  Target: SCNA; (+) strand; PAM type: YTN; PAM sequence: CTT
ccatttcattatttgccaaa

SEQ ID NO: 82696 - DNA, 20 bp, Artificial Sequence
  Description of Artificial Sequence: Synthetic oligonucleotide
  Target: SCNA; (+) strand; PAM type: YTN; PAM sequence: TTC
catttcattatttgccaaac

SEQ ID NO: 82697 - DNA, 20 bp, Artificial Sequence
  Description of Artificial Sequence: Synthetic oligonucleotide
  Target: SCNA; (+) strand; PAM type: YTN; PAM sequence: TTT
cattatttgccaaacgcagc

SEQ ID NO: 82698 - DNA, 20 bp, Artificial Sequence
  Description of Artificial Sequence: Synthetic oligonucleotide
  Target: SCNA; (+) strand; PAM type: YTN; PAM sequence: TTC
attatttgccaaacgcagct

SEQ ID NO: 82699 - DNA, 20 bp, Artificial Sequence
  Description of Artificial Sequence: Synthetic oligonucleotide
  Target: SCNA; (+) strand; PAM type: YTN; PAM sequence: TTA
tttgccaaacgcagcttgct

SEQ ID NO: 82700 - DNA, 20 bp, Artificial Sequence
  Description of Artificial Sequence: Synthetic oligonucleotide
  Target: SCNA; (+) strand; PAM type: YTN; PAM sequence: TTT
gccaaacgcagcttgcttac

SEQ ID NO: 82701 - DNA, 20 bp, Artificial Sequence
  Description of Artificial Sequence: Synthetic oligonucleotide
  Target: SCNA; (+) strand; PAM type: YTN; PAM sequence: TTG
ccaaacgcagcttgcttact

SEQ ID NO: 82702 - DNA, 20 bp, Artificial Sequence
  Description of Artificial Sequence: Synthetic oligonucleotide
  Target: SCNA; (+) strand; PAM type: YTN; PAM sequence: CTT
gcttactttacagagaaaaa

SEQ ID NO: 82703 - DNA, 20 bp, Artificial Sequence
  Description of Artificial Sequence: Synthetic oligonucleotide
  Target: SCNA; (+) strand; PAM type: YTN; PAM sequence: TTG
cttactttacagagaaaaac

SEQ ID NO: 82704 - DNA, 20 bp, Artificial Sequence
  Description of Artificial Sequence: Synthetic oligonucleotide
  Target: SCNA; (+) strand; PAM type: YTN; PAM sequence: CTT
actttacagagaaaaaccaa

SEQ ID NO: 82705 - DNA, 20 bp, Artificial Sequence
  Description of Artificial Sequence: Synthetic oligonucleotide
  Target: SCNA; (+) strand; PAM type: YTN; PAM sequence: TTA
ctttacagagaaaaaccaag

SEQ ID NO: 82706 - DNA, 20 bp, Artificial Sequence
  Description of Artificial Sequence: Synthetic oligonucleotide
  Target: SCNA; (+) strand; PAM type: YTN; PAM sequence: CTT
tacagagaaaaaccaagaga

SEQ ID NO: 82707 - DNA, 20 bp, Artificial Sequence
  Description of Artificial Sequence: Synthetic oligonucleotide
  Target: SCNA; (+) strand; PAM type: YTN; PAM sequence: TTT
acagagaaaaaccaagagag

SEQ ID NO: 82708 - DNA, 20 bp, Artificial Sequence
  Description of Artificial Sequence: Synthetic oligonucleotide
  Target: SCNA; (+) strand; PAM type: YTN; PAM sequence: TTA
cagagaaaaaccaagagagc

SEQ ID NO: 82709 - DNA, 20 bp, Artificial Sequence
  Description of Artificial Sequence: Synthetic oligonucleotide
  Target: SCNA; (+) strand; PAM type: YTN; PAM sequence: TTT
tatgtgagagaaaagttgga

SEQ ID NO: 82710 - DNA, 20 bp, Artificial Sequence
  Description of Artificial Sequence: Synthetic oligonucleotide
  Target: SCNA; (+) strand; PAM type: YTN; PAM sequence: TTT
atgtgagagaaaagttggat

SEQ ID NO: 82711 - DNA, 20 bp, Artificial Sequence
  Description of Artificial Sequence: Synthetic oligonucleotide
  Target: SCNA; (+) strand; PAM type: YTN; PAM sequence: TTA
tgtgagagaaaagttggatg

SEQ ID NO: 82712 - DNA, 20 bp, Artificial Sequence
  Description of Artificial Sequence: Synthetic oligonucleotide
  Target: SCNA; (+) strand; PAM type: YTN; PAM sequence: TTG
gatgctcacgctccatggag

SEQ ID NO: 82713 - DNA, 20 bp, Artificial Sequence
  Description of Artificial Sequence: Synthetic oligonucleotide
  Target: SCNA; (+) strand; PAM type: YTN; PAM sequence: CTC
acgctccatggagcatcctc

SEQ ID NO: 82714 - DNA, 20 bp, Artificial Sequence
  Description of Artificial Sequence: Synthetic oligonucleotide
  Target: SCNA; (+) strand; PAM type: YTN; PAM sequence: CTC
catggagcatcctcgcgttt

SEQ ID NO: 82715 - DNA, 20 bp, Artificial Sequence
  Description of Artificial Sequence: Synthetic oligonucleotide
  Target: SCNA; (+) strand; PAM type: YTN; PAM sequence: CTC
gcgtttcccggggaaaagcg

SEQ ID NO: 82716 - DNA, 20 bp, Artificial Sequence
  Description of Artificial Sequence: Synthetic oligonucleotide
  Target: SCNA; (+) strand; PAM type: YTN; PAM sequence: TTT
cccggggaaaagcggatccc

SEQ ID NO: 82717 - DNA, 20 bp, Artificial Sequence
  Description of Artificial Sequence: Synthetic oligonucleotide
  Target: SCNA; (+) strand; PAM type: YTN; PAM sequence: TTC
ccggggaaaagcggatcccg

SEQ ID NO: 82718 - DNA, 20 bp, Artificial Sequence
  Description of Artificial Sequence: Synthetic oligonucleotide
  Target: SCNA; (+) strand; PAM type: YTN; PAM sequence: CTA
atctctcagcccttgtggag

SEQ ID NO: 82719 - DNA, 20 bp, Artificial Sequence
  Description of Artificial Sequence: Synthetic oligonucleotide
  Target: SCNA; (+) strand; PAM type: YTN; PAM sequence: CTC
tcagcccttgtggagaaggg

SEQ ID NO: 82720 - DNA, 20 bp, Artificial Sequence
  Description of Artificial Sequence: Synthetic oligonucleotide
  Target: SCNA; (+) strand; PAM type: YTN; PAM sequence: CTC
agcccttgtggagaagggaa

SEQ ID NO: 82721 - DNA, 20 bp, Artificial Sequence
  Description of Artificial Sequence: Synthetic oligonucleotide
  Target: SCNA; (+) strand; PAM type: YTN; PAM sequence: CTT
gtggagaagggaatatcaga

SEQ ID NO: 82722 - DNA, 20 bp, Artificial Sequence
  Description of Artificial Sequence: Synthetic oligonucleotide
  Target: SCNA; (+) strand; PAM type: YTN; PAM sequence: TTG
tggagaagggaatatcagaa

SEQ ID NO: 82723 - DNA, 20 bp, Artificial Sequence
  Description of Artificial Sequence: Synthetic oligonucleotide
  Target: SCNA; (+) strand; PAM type: YTN; PAM sequence: CTC
tttccttaggctccccaaag

SEQ ID NO: 82724 - DNA, 20 bp, Artificial Sequence
  Description of Artificial Sequence: Synthetic oligonucleotide
  Target: SCNA; (+) strand; PAM type: YTN; PAM sequence: CTT
tccttaggctccccaaaggg

SEQ ID NO: 82725 - DNA, 20 bp, Artificial Sequence
  Description of Artificial Sequence: Synthetic oligonucleotide
  Target: SCNA; (+) strand; PAM type: YTN; PAM sequence: TTT
ccttaggctccccaaaggga

SEQ ID NO: 82726 - DNA, 20 bp, Artificial Sequence
  Description of Artificial Sequence: Synthetic oligonucleotide
  Target: SCNA; (+) strand; PAM type: YTN; PAM sequence: TTC
cttaggctccccaaagggac

SEQ ID NO: 82727 - DNA, 20 bp, Artificial Sequence
  Description of Artificial Sequence: Synthetic oligonucleotide
  Target: SCNA; (+) strand; PAM type: YTN; PAM sequence: CTT
aggctccccaaagggacaag

SEQ ID NO: 82728 - DNA, 20 bp, Artificial Sequence
  Description of Artificial Sequence: Synthetic oligonucleotide
  Target: SCNA; (+) strand; PAM type: YTN; PAM sequence: TTA
ggctccccaaagggacaagt

SEQ ID NO: 82729 - DNA, 20 bp, Artificial Sequence
  Description of Artificial Sequence: Synthetic oligonucleotide
  Target: SCNA; (+) strand; PAM type: YTN; PAM sequence: CTC
cccaaagggacaagtactca

SEQ ID NO: 82730 - DNA, 20 bp, Artificial Sequence
  Description of Artificial Sequence: Synthetic oligonucleotide
  Target: SCNA; (+) strand; PAM type: YTN; PAM sequence: CTC
acctcccagagacctggccc

SEQ ID NO: 82731 - DNA, 20 bp, Artificial Sequence
  Description of Artificial Sequence: Synthetic oligonucleotide
  Target: SCNA; (+) strand; PAM type: YTN; PAM sequence: CTC
ccagagacctggcccagcgg

SEQ ID NO: 82732 - DNA, 20 bp, Artificial Sequence
  Description of Artificial Sequence: Synthetic oligonucleotide
  Target: SCNA; (+) strand; PAM type: YTN; PAM sequence: CTG
gcccagcgggtcctcatggc

SEQ ID NO: 82733 - DNA, 20 bp, Artificial Sequence
  Description of Artificial Sequence: Synthetic oligonucleotide
  Target: SCNA; (+) strand; PAM type: YTN; PAM sequence: CTC
atggcagcaccaccccctcc

SEQ ID NO: 82734 - DNA, 20 bp, Artificial Sequence
  Description of Artificial Sequence: Synthetic oligonucleotide
  Target: SCNA; (+) strand; PAM type: YTN; PAM sequence: CTC
ccggtgcccacgaccattcg

SEQ ID NO: 82735 - DNA, 20 bp, Artificial Sequence
  Description of Artificial Sequence: Synthetic oligonucleotide
  Target: SCNA; (+) strand; PAM type: YTN; PAM sequence: TTC
gtctcccatccggcgttctc

SEQ ID NO: 82736 - DNA, 20 bp, Artificial Sequence
  Description of Artificial Sequence: Synthetic oligonucleotide
  Target: SCNA; (+) strand; PAM type: YTN; PAM sequence: CTC
ccatccggcgttctccagga

SEQ ID NO: 82737 - DNA, 20 bp, Artificial Sequence
  Description of Artificial Sequence: Synthetic oligonucleotide
  Target: SCNA; (+) strand; PAM type: YTN; PAM sequence: TTC
tccaggatttccaaagacgc

SEQ ID NO: 82738 - DNA, 20 bp, Artificial Sequence
  Description of Artificial Sequence: Synthetic oligonucleotide
  Target: SCNA; (+) strand; PAM type: YTN; PAM sequence: CTC
caggatttccaaagacgccc

SEQ ID NO: 82739 - DNA, 20 bp, Artificial Sequence
  Description of Artificial Sequence: Synthetic oligonucleotide
  Target: SCNA; (+) strand; PAM type: YTN; PAM sequence: TTT
ccaaagacgcccgtttagat

SEQ ID NO: 82740 - DNA, 20 bp, Artificial Sequence
  Description of Artificial Sequence: Synthetic oligonucleotide
  Target: SCNA; (+) strand; PAM type: YTN; PAM sequence: TTC
caaagacgcccgtttagatc

SEQ ID NO: 82741 - DNA, 20 bp, Artificial Sequence
  Description of Artificial Sequence: Synthetic oligonucleotide
  Target: SCNA; (+) strand; PAM type: YTN; PAM sequence: TTT
agatccacaggtacttacct

SEQ ID NO: 82742 - DNA, 20 bp, Artificial Sequence
  Description of Artificial Sequence: Synthetic oligonucleotide
  Target: SCNA; (+) strand; PAM type: YTN; PAM sequence: TTA
gatccacaggtacttacctg

SEQ ID NO: 82743 - DNA, 20 bp, Artificial Sequence
  Description of Artificial Sequence: Synthetic oligonucleotide
  Target: SCNA; (+) strand; PAM type: YTN; PAM sequence: CTT
acctgagtccctctgcttct

SEQ ID NO: 82744 - DNA, 20 bp, Artificial Sequence
  Description of Artificial Sequence: Synthetic oligonucleotide
  Target: SCNA; (+) strand; PAM type: YTN; PAM sequence: TTA
cctgagtccctctgcttctc

SEQ ID NO: 82745 - DNA, 20 bp, Artificial Sequence
  Description of Artificial Sequence: Synthetic oligonucleotide
  Target: SCNA; (+) strand; PAM type: YTN; PAM sequence: CTG
agtccctctgcttctccaca

SEQ ID NO: 82746 - DNA, 20 bp, Artificial Sequence
  Description of Artificial Sequence: Synthetic oligonucleotide
  Target: SCNA; (+) strand; PAM type: YTN; PAM sequence: CTC
tgcttctccacaactccgac

SEQ ID NO: 82747 - DNA, 20 bp, Artificial Sequence
  Description of Artificial Sequence: Synthetic oligonucleotide
  Target: SCNA; (+) strand; PAM type: YTN; PAM sequence: CTG
cttctccacaactccgactc

SEQ ID NO: 82748 - DNA, 20 bp, Artificial Sequence
  Description of Artificial Sequence: Synthetic oligonucleotide
  Target: SCNA; (+) strand; PAM type: YTN; PAM sequence: CTT
ctccacaactccgactcctc

SEQ ID NO: 82749 - DNA, 20 bp, Artificial Sequence
  Description of Artificial Sequence: Synthetic oligonucleotide
  Target: SCNA; (+) strand; PAM type: YTN; PAM sequence: TTC
tccacaactccgactcctcc

SEQ ID NO: 82750 - DNA, 20 bp, Artificial Sequence
  Description of Artificial Sequence: Synthetic oligonucleotide
  Target: SCNA; (+) strand; PAM type: YTN; PAM sequence: CTC
cacaactccgactcctcccc

SEQ ID NO: 82751 - DNA, 20 bp, Artificial Sequence
  Description of Artificial Sequence: Synthetic oligonucleotide
  Target: SCNA; (+) strand; PAM type: YTN; PAM sequence: CTC
cgactcctccccgcctctct

SEQ ID NO: 82752 - DNA, 20 bp, Artificial Sequence
  Description of Artificial Sequence: Synthetic oligonucleotide
  Target: SCNA; (+) strand; PAM type: YTN; PAM sequence: CTC
ctccccgcctctctcttttt

SEQ ID NO: 82753 - DNA, 20 bp, Artificial Sequence
  Description of Artificial Sequence: Synthetic oligonucleotide
  Target: SCNA; (+) strand; PAM type: YTN; PAM sequence: CTC
cccgcctctctcttttttta

SEQ ID NO: 82754 - DNA, 20 bp, Artificial Sequence
  Description of Artificial Sequence: Synthetic oligonucleotide
  Target: SCNA; (+) strand; PAM type: YTN; PAM sequence: CTC
tctctttttttaaaaaaaaa

SEQ ID NO: 82755 - DNA, 20 bp, Artificial Sequence
  Description of Artificial Sequence: Synthetic oligonucleotide
  Target: SCNA; (+) strand; PAM type: YTN; PAM sequence: CTC
tctttttttaaaaaaaaaat

SEQ ID NO: 82756 - DNA, 20 bp, Artificial Sequence
  Description of Artificial Sequence: Synthetic oligonucleotide
  Target: SCNA; (+) strand; PAM type: YTN; PAM sequence: CTC
tttttttaaaaaaaaaattt

SEQ ID NO: 82757 - DNA, 20 bp, Artificial Sequence
  Description of Artificial Sequence: Synthetic oligonucleotide
  Target: SCNA; (+) strand; PAM type: YTN; PAM sequence: CTT
tttttaaaaaaaaaatttaa

SEQ ID NO: 82758 - DNA, 20 bp, Artificial Sequence
  Description of Artificial Sequence: Synthetic oligonucleotide
  Target: SCNA; (+) strand; PAM type: YTN; PAM sequence: TTT
ttttaaaaaaaaaatttaaa

SEQ ID NO: 82759 - DNA, 20 bp, Artificial Sequence
  Description of Artificial Sequence: Synthetic oligonucleotide
  Target: SCNA; (+) strand; PAM type: YTN; PAM sequence: TTT
tttaaaaaaaaaatttaaac

SEQ ID NO: 82760 - DNA, 20 bp, Artificial Sequence
  Description of Artificial Sequence: Synthetic oligonucleotide
  Target: SCNA; (+) strand; PAM type: YTN; PAM sequence: TTT
ttaaaaaaaaaatttaaaca

SEQ ID NO: 82761 - DNA, 20 bp, Artificial Sequence
  Description of Artificial Sequence: Synthetic oligonucleotide
  Target: SCNA; (+) strand; PAM type: YTN; PAM sequence: TTT
taaaaaaaaaatttaaacaa

SEQ ID NO: 82762 - DNA, 20 bp, Artificial Sequence
  Description of Artificial Sequence: Synthetic oligonucleotide
  Target: SCNA; (+) strand; PAM type: YTN; PAM sequence: TTT
aaaaaaaaaatttaaacaat

SEQ ID NO: 82763 - DNA, 20 bp, Artificial Sequence
  Description of Artificial Sequence: Synthetic oligonucleotide
  Target: SCNA; (+) strand; PAM type: YTN; PAM sequence: TTA
aaaaaaaaatttaaacaatt

SEQ ID NO: 82764 - DNA, 20 bp, Artificial Sequence
  Description of Artificial Sequence: Synthetic oligonucleotide
  Target: SCNA; (+) strand; PAM type: YTN; PAM sequence: TTT
aaacaattcccaaataatat

SEQ ID NO: 82765 - DNA, 20 bp, Artificial Sequence
  Description of Artificial Sequence: Synthetic oligonucleotide
  Target: SCNA; (+) strand; PAM type: YTN; PAM sequence: TTA
aacaattcccaaataatatt

SEQ ID NO: 82766 - DNA, 20 bp, Artificial Sequence
  Description of Artificial Sequence: Synthetic oligonucleotide
  Target: SCNA; (+) strand; PAM type: YTN; PAM sequence: TTC
ccaaataatatttaatagga

SEQ ID NO: 82767 - DNA, 20 bp, Artificial Sequence
  Description of Artificial Sequence: Synthetic oligonucleotide
  Target: SCNA; (+) strand; PAM type: YTN; PAM sequence: TTT
aataggaaagaagaaggaaa

SEQ ID NO: 82768 - DNA, 20 bp, Artificial Sequence
  Description of Artificial Sequence: Synthetic oligonucleotide
  Target: SCNA; (+) strand; PAM type: YTN; PAM sequence: TTA
ataggaaagaagaaggaaaa

SEQ ID NO: 82769 - DNA, 20 bp, Artificial Sequence
  Description of Artificial Sequence: Synthetic oligonucleotide
  Target: SCNA; (+) strand; PAM type: YTN; PAM sequence: CTG
tccccagaggaggccgctgt

SEQ ID NO: 82770 - DNA, 20 bp, Artificial Sequence
  Description of Artificial Sequence: Synthetic oligonucleotide
  Target: SCNA; (+) strand; PAM type: YTN; PAM sequence: CTG
tgagccggcgacgcgaggct

SEQ ID NO: 82771 - DNA, 20 bp, Artificial Sequence
  Description of Artificial Sequence: Synthetic oligonucleotide
  Target: SCNA; (+) strand; PAM type: YTN; PAM sequence: CTG
ggggagtgggaggcaaaccc

SEQ ID NO: 82772 - DNA, 20 bp, Artificial Sequence
  Description of Artificial Sequence: Synthetic oligonucleotide
  Target: SCNA; (+) strand; PAM type: YTN; PAM sequence: CTA
acctgtcgtcgaatggccac

SEQ ID NO: 82773 - DNA, 20 bp, Artificial Sequence
  Description of Artificial Sequence: Synthetic oligonucleotide
  Target: SCNA; (+) strand; PAM type: YTN; PAM sequence: CTG
tcgtcgaatggccactccca

SEQ ID NO: 82774 - DNA, 20 bp, Artificial Sequence
  Description of Artificial Sequence: Synthetic oligonucleotide
  Target: SCNA; (+) strand; PAM type: YTN; PAM sequence: CTC
ccagttctccgctcacgagg

SEQ ID NO: 82775 - DNA, 20 bp, Artificial Sequence
  Description of Artificial Sequence: Synthetic oligonucleotide
  Target: SCNA; (+) strand; PAM type: YTN; PAM sequence: TTC
tccgctcacgagggtggaaa

SEQ ID NO: 82776 - DNA, 20 bp, Artificial Sequence
  Description of Artificial Sequence: Synthetic oligonucleotide
  Target: SCNA; (+) strand; PAM type: YTN; PAM sequence: CTC
cgctcacgagggtggaaagg

SEQ ID NO: 82777 - DNA, 20 bp, Artificial Sequence
  Description of Artificial Sequence: Synthetic oligonucleotide
  Target: SCNA; (+) strand; PAM type: YTN; PAM sequence: CTC
acgagggtggaaaggcagaa

SEQ ID NO: 82778 - DNA, 20 bp, Artificial Sequence
  Description of Artificial Sequence: Synthetic oligonucleotide
  Target: SCNA; (+) strand; PAM type: YTN; PAM sequence: CTT
gaaggcaaggcgtgagggag

SEQ ID NO: 82779 - DNA, 20 bp, Artificial Sequence
  Description of Artificial Sequence: Synthetic oligonucleotide
  Target: SCNA; (+) strand; PAM type: YTN; PAM sequence: TTG
aaggcaaggcgtgagggagc

SEQ ID NO: 82780 - DNA, 20 bp, Artificial Sequence
  Description of Artificial Sequence: Synthetic oligonucleotide
  Target: SCNA; (+) strand; PAM type: YTN; PAM sequence: CTC
tcggaggggccgggccgggg

SEQ ID NO: 82781 - DNA, 20 bp, Artificial Sequence
  Description of Artificial Sequence: Synthetic oligonucleotide
  Target: SCNA; (+) strand; PAM type: YTN; PAM sequence: CTC
ggaggggccgggccggggtc

SEQ ID NO: 82782 - DNA, 20 bp, Artificial Sequence
  Description of Artificial Sequence: Synthetic oligonucleotide
  Target: SCNA; (+) strand; PAM type: YTN; PAM sequence: CTG
cgctgcagcccgcacgcacc

SEQ ID NO: 82783 - DNA, 20 bp, Artificial Sequence
  Description of Artificial Sequence: Synthetic oligonucleotide
  Target: SCNA; (+) strand; PAM type: YTN; PAM sequence: CTG
cagcccgcacgcacctcact

SEQ ID NO: 82784 - DNA, 20 bp, Artificial Sequence
  Description of Artificial Sequence: Synthetic oligonucleotide
  Target: SCNA; (+) strand; PAM type: YTN; PAM sequence: CTC
acttccgcgtcgcggcgctc

SEQ ID NO: 82785 - DNA, 20 bp, Artificial Sequence
  Description of Artificial Sequence: Synthetic oligonucleotide
  Target: SCNA; (+) strand; PAM type: YTN; PAM sequence: CTT
ccgcgtcgcggcgctcggtc

SEQ ID NO: 82786 - DNA, 20 bp, Artificial Sequence
  Description of Artificial Sequence: Synthetic oligonucleotide
  Target: SCNA; (+) strand; PAM type: YTN; PAM sequence: TTC
cgcgtcgcggcgctcggtcg

SEQ ID NO: 82787 - DNA, 20 bp, Artificial Sequence
  Description of Artificial Sequence: Synthetic oligonucleotide
  Target: SCNA; (+) strand; PAM type: YTN; PAM sequence: CTC
ggtcgctcgccccctctctt

SEQ ID NO: 82788 - DNA, 20 bp, Artificial Sequence
  Description of Artificial Sequence: Synthetic oligonucleotide
  Target: SCNA; (+) strand; PAM type: YTN; PAM sequence: CTC
gccccctctcttgggcccct

SEQ ID NO: 82789 - DNA, 20 bp, Artificial Sequence
  Description of Artificial Sequence: Synthetic oligonucleotide
  Target: SCNA; (+) strand; PAM type: YTN; PAM sequence: CTC
tcttgggccccttctggtcg

SEQ ID NO: 82790 - DNA, 20 bp, Artificial Sequence
  Description of Artificial Sequence: Synthetic oligonucleotide
  Target: SCNA; (+) strand; PAM type: YTN; PAM sequence: CTC
ttgggccccttctggtcgtc

SEQ ID NO: 82791 - DNA, 20 bp, Artificial Sequence
  Description of Artificial Sequence: Synthetic oligonucleotide
  Target: SCNA; (+) strand; PAM type: YTN; PAM sequence: CTT
gggccccttctggtcgtcgc

SEQ ID NO: 82792 - DNA, 20 bp, Artificial Sequence
  Description of Artificial Sequence: Synthetic oligonucleotide
  Target: SCNA; (+) strand; PAM type: YTN; PAM sequence: TTG
ggccccttctggtcgtcgcc

SEQ ID NO: 82793 - DNA, 20 bp, Artificial Sequence
  Description of Artificial Sequence: Synthetic oligonucleotide
  Target: SCNA; (+) strand; PAM type: YTN; PAM sequence: CTT
ctggtcgtcgccgtcctcct

SEQ ID NO: 82794 - DNA, 20 bp, Artificial Sequence
  Description of Artificial Sequence: Synthetic oligonucleotide
  Target: SCNA; (+) strand; PAM type: YTN; PAM sequence: TTC
tggtcgtcgccgtcctcctc

SEQ ID NO: 82795 - DNA, 20 bp, Artificial Sequence
  Description of Artificial Sequence: Synthetic oligonucleotide
  Target: SCNA; (+) strand; PAM type: YTN; PAM sequence: CTG
gtcgtcgccgtcctcctcct

SEQ ID NO: 82796 - DNA, 20 bp, Artificial Sequence
  Description of Artificial Sequence: Synthetic oligonucleotide
  Target: SCNA; (+) strand; PAM type: YTN; PAM sequence: CTC
ctcctcctagtcctcctcct

SEQ ID NO: 82797 - DNA, 20 bp, Artificial Sequence
  Description of Artificial Sequence: Synthetic oligonucleotide
  Target: SCNA; (+) strand; PAM type: YTN; PAM sequence: CTC
ctcctagtcctcctccttct

SEQ ID NO: 82798 - DNA, 20 bp, Artificial Sequence
  Description of Artificial Sequence: Synthetic oligonucleotide
  Target: SCNA; (+) strand; PAM type: YTN; PAM sequence: CTC
ctagtcctcctccttctcct

SEQ ID NO: 82799 - DNA, 20 bp, Artificial Sequence
  Description of Artificial Sequence: Synthetic oligonucleotide
  Target: SCNA; (+) strand; PAM type: YTN; PAM sequence: CTA
gtcctcctccttctccttct

SEQ ID NO: 82800 - DNA, 20 bp, Artificial Sequence
  Description of Artificial Sequence: Synthetic oligonucleotide
  Target: SCNA; (+) strand; PAM type: YTN; PAM sequence: CTC
ctccttctccttctcctcgg

SEQ ID NO: 82801 - DNA, 20 bp, Artificial Sequence
  Description of Artificial Sequence: Synthetic oligonucleotide
  Target: SCNA; (+) strand; PAM type: YTN; PAM sequence: CTC
cttctccttctcctcggctc

SEQ ID NO: 82802 - DNA, 20 bp, Artificial Sequence
  Description of Artificial Sequence: Synthetic oligonucleotide
  Target: SCNA; (+) strand; PAM type: YTN; PAM sequence: CTT
ctccttctcctcggctctcc

SEQ ID NO: 82803 - DNA, 20 bp, Artificial Sequence
  Description of Artificial Sequence: Synthetic oligonucleotide
  Target: SCNA; (+) strand; PAM type: YTN; PAM sequence: TTC
tccttctcctcggctctccg

SEQ ID NO: 82804 - DNA, 20 bp, Artificial Sequence
  Description of Artificial Sequence: Synthetic oligonucleotide
  Target: SCNA; (+) strand; PAM type: YTN; PAM sequence: CTC
cttctcctcggctctccgcc

SEQ ID NO: 82805 - DNA, 20 bp, Artificial Sequence
  Description of Artificial Sequence: Synthetic oligonucleotide
  Target: SCNA; (+) strand; PAM type: YTN; PAM sequence: CTT
ctcctcggctctccgccccc

SEQ ID NO: 82806 - DNA, 20 bp, Artificial Sequence
  Description of Artificial Sequence: Synthetic oligonucleotide
  Target: SCNA; (+) strand; PAM type: YTN; PAM sequence: TTC
tcctcggctctccgccccca

SEQ ID NO: 82807 - DNA, 20 bp, Artificial Sequence
  Description of Artificial Sequence: Synthetic oligonucleotide
  Target: SCNA; (+) strand; PAM type: YTN; PAM sequence: CTC
ctcggctctccgcccccacc

SEQ ID NO: 82808 - DNA, 20 bp, Artificial Sequence
  Description of Artificial Sequence: Synthetic oligonucleotide
  Target: SCNA; (+) strand; PAM type: YTN; PAM sequence: CTC
ggctctccgcccccaccgct

SEQ ID NO: 82809 - DNA, 20 bp, Artificial Sequence
  Description of Artificial Sequence: Synthetic oligonucleotide
  Target: SCNA; (+) strand; PAM type: YTN; PAM sequence: CTC
tccgcccccaccgctgattt

SEQ ID NO: 82810 - DNA, 20 bp, Artificial Sequence
  Description of Artificial Sequence: Synthetic oligonucleotide
  Target: SCNA; (+) strand; PAM type: YTN; PAM sequence: CTC
cgcccccaccgctgatttgt

SEQ ID NO: 82811 - DNA, 20 bp, Artificial Sequence
  Description of Artificial Sequence: Synthetic oligonucleotide
  Target: SCNA; (+) strand; PAM type: YTN; PAM sequence: CTG
atttgtcagcgcttctgccc

SEQ ID NO: 82812 - DNA, 20 bp, Artificial Sequence
  Description of Artificial Sequence: Synthetic oligonucleotide
  Target: SCNA; (+) strand; PAM type: YTN; PAM sequence: TTT
gtcagcgcttctgcccgccc

SEQ ID NO: 82813 - DNA, 20 bp, Artificial Sequence
  Description of Artificial Sequence: Synthetic oligonucleotide
  Target: SCNA; (+) strand; PAM type: YTN; PAM sequence: TTG
tcagcgcttctgcccgcccc

SEQ ID NO: 82814 - DNA, 20 bp, Artificial Sequence
  Description of Artificial Sequence: Synthetic oligonucleotide
  Target: SCNA; (+) strand; PAM type: YTN; PAM sequence: CTT
ctgcccgcccctctcccggc

SEQ ID NO: 82815 - DNA, 20 bp, Artificial Sequence
  Description of Artificial Sequence: Synthetic oligonucleotide
  Target: SCNA; (+) strand; PAM type: YTN; PAM sequence: TTC
tgcccgcccctctcccggcg

SEQ ID NO: 82816 - DNA, 20 bp, Artificial Sequence
  Description of Artificial Sequence: Synthetic oligonucleotide
  Target: SCNA; (+) strand; PAM type: YTN; PAM sequence: CTG
cccgcccctctcccggcgct

SEQ ID NO: 82817 - DNA, 20 bp, Artificial Sequence
  Description of Artificial Sequence: Synthetic oligonucleotide
  Target: SCNA; (+) strand; PAM type: YTN; PAM sequence: CTC
tcccggcgctcgctgctttc

SEQ ID NO: 82818 - DNA, 20 bp, Artificial Sequence
  Description of Artificial Sequence: Synthetic oligonucleotide
  Target: SCNA; (+) strand; PAM type: YTN; PAM sequence: CTC
ccggcgctcgctgctttccc

SEQ ID NO: 82819 - DNA, 20 bp, Artificial Sequence
  Description of Artificial Sequence: Synthetic oligonucleotide
  Target: SCNA; (+) strand; PAM type: YTN; PAM sequence: CTC
gctgctttccctgcagcgtg

SEQ ID NO: 82820 - DNA, 20 bp, Artificial Sequence
  Description of Artificial Sequence: Synthetic oligonucleotide
  Target: SCNA; (+) strand; PAM type: YTN; PAM sequence: CTG
ctttccctgcagcgtgctcc

SEQ ID NO: 82821 - DNA, 20 bp, Artificial Sequence
  Description of Artificial Sequence: Synthetic oligonucleotide
  Target: SCNA; (+) strand; PAM type: YTN; PAM sequence: CTT
tccctgcagcgtgctcctcg

SEQ ID NO: 82822 - DNA, 20 bp, Artificial Sequence
  Description of Artificial Sequence: Synthetic oligonucleotide
  Target: SCNA; (+) strand; PAM type: YTN; PAM sequence: TTT
ccctgcagcgtgctcctcgt

SEQ ID NO: 82823 - DNA, 20 bp, Artificial Sequence
  Description of Artificial Sequence: Synthetic oligonucleotide
  Target: SCNA; (+) strand; PAM type: YTN; PAM sequence: TTC
cctgcagcgtgctcctcgtc

SEQ ID NO: 82824 - DNA, 20 bp, Artificial Sequence
  Description of Artificial Sequence: Synthetic oligonucleotide
  Target: SCNA; (+) strand; PAM type: YTN; PAM sequence: CTG
cagcgtgctcctcgtcccta

SEQ ID NO: 82825 - DNA, 20 bp, Artificial Sequence
  Description of Artificial Sequence: Synthetic oligonucleotide
  Target: SCNA; (+) strand; PAM type: YTN; PAM sequence: CTC
ctcgtccctatctcggatgg

SEQ ID NO: 82826 - DNA, 20 bp, Artificial Sequence
  Description of Artificial Sequence: Synthetic oligonucleotide
  Target: SCNA; (+) strand; PAM type: YTN; PAM sequence: CTC
gtccctatctcggatgggga

SEQ ID NO: 82827 - DNA, 20 bp, Artificial Sequence
  Description of Artificial Sequence: Synthetic oligonucleotide
  Target: SCNA; (+) strand; PAM type: YTN; PAM sequence: CTA
tctcggatggggatggggca

SEQ ID NO: 82828 - DNA, 20 bp, Artificial Sequence
  Description of Artificial Sequence: Synthetic oligonucleotide
  Target: SCNA; (+) strand; PAM type: YTN; PAM sequence: CTC
ggatggggatggggcagggg

SEQ ID NO: 82829 - DNA, 20 bp, Artificial Sequence
  Description of Artificial Sequence: Synthetic oligonucleotide
  Target: SCNA; (+) strand; PAM type: YTN; PAM sequence: CTC
cagccgcctgcctggccgcg

SEQ ID NO: 82830 - DNA, 20 bp, Artificial Sequence
  Description of Artificial Sequence: Synthetic oligonucleotide
  Target: SCNA; (+) strand; PAM type: YTN; PAM sequence: CTG
cctggccgcgcaaggcggga

SEQ ID NO: 82831 - DNA, 20 bp, Artificial Sequence
  Description of Artificial Sequence: Synthetic oligonucleotide
  Target: SCNA; (+) strand; PAM type: YTN; PAM sequence: CTG
gccgcgcaaggcgggaaagt

SEQ ID NO: 82832 - DNA, 20 bp, Artificial Sequence
  Description of Artificial Sequence: Synthetic oligonucleotide
  Target: SCNA; (+) strand; PAM type: YTN; PAM sequence: CTT
ttgcgcctcacgttaagttt

SEQ ID NO: 82833 - DNA, 20 bp, Artificial Sequence
  Description of Artificial Sequence: Synthetic oligonucleotide
  Target: SCNA; (+) strand; PAM type: YTN; PAM sequence: TTT
tgcgcctcacgttaagttta

SEQ ID NO: 82834 - DNA, 20 bp, Artificial Sequence
  Description of Artificial Sequence: Synthetic oligonucleotide
  Target: SCNA; (+) strand; PAM type: YTN; PAM sequence: TTT
gcgcctcacgttaagtttag

SEQ ID NO: 82835 - DNA, 20 bp, Artificial Sequence
  Description of Artificial Sequence: Synthetic oligonucleotide
  Target: SCNA; (+) strand; PAM type: YTN; PAM sequence: TTG
cgcctcacgttaagtttagg

SEQ ID NO: 82836 - DNA, 20 bp, Artificial Sequence
  Description of Artificial Sequence: Synthetic oligonucleotide
  Target: SCNA; (+) strand; PAM type: YTN; PAM sequence: CTC
acgttaagtttagggtcacg

SEQ ID NO: 82837 - DNA, 20 bp, Artificial Sequence
  Description of Artificial Sequence: Synthetic oligonucleotide
  Target: SCNA; (+) strand; PAM type: YTN; PAM sequence: TTA
agtttagggtcacgagcact

SEQ ID NO: 82838 - DNA, 20 bp, Artificial Sequence
  Description of Artificial Sequence: Synthetic oligonucleotide
  Target: SCNA; (+) strand; PAM type: YTN; PAM sequence: TTT
agggtcacgagcactcttgt

SEQ ID NO: 82839 - DNA, 20 bp, Artificial Sequence
  Description of Artificial Sequence: Synthetic oligonucleotide
  Target: SCNA; (+) strand; PAM type: YTN; PAM sequence: TTA
gggtcacgagcactcttgtg

SEQ ID NO: 82840 - DNA, 20 bp, Artificial Sequence
  Description of Artificial Sequence: Synthetic oligonucleotide
  Target: SCNA; (+) strand; PAM type: YTN; PAM sequence: CTC
ttgtggagatcgggagcggt

SEQ ID NO: 82841 - DNA, 20 bp, Artificial Sequence
  Description of Artificial Sequence: Synthetic oligonucleotide
  Target: SCNA; (+) strand; PAM type: YTN; PAM sequence: CTT
gtggagatcgggagcggttg

SEQ ID NO: 82842 - DNA, 20 bp, Artificial Sequence
  Description of Artificial Sequence: Synthetic oligonucleotide
  Target: SCNA; (+) strand; PAM type: YTN; PAM sequence: TTG
tggagatcgggagcggttgg

SEQ ID NO: 82843 - DNA, 20 bp, Artificial Sequence
  Description of Artificial Sequence: Synthetic oligonucleotide
  Target: SCNA; (+) strand; PAM type: YTN; PAM sequence: TTG
ggctagggatgatgcctctt

SEQ ID NO: 82844 - DNA, 20 bp, Artificial Sequence
  Description of Artificial Sequence: Synthetic oligonucleotide
  Target: SCNA; (+) strand; PAM type: YTN; PAM sequence: CTA
gggatgatgcctcttcctct

SEQ ID NO: 82845 - DNA, 20 bp, Artificial Sequence
  Description of Artificial Sequence: Synthetic oligonucleotide
  Target: SCNA; (+) strand; PAM type: YTN; PAM sequence: CTC
ttcctctttccccttcccct

SEQ ID NO: 82846 - DNA, 20 bp, Artificial Sequence
  Description of Artificial Sequence: Synthetic oligonucleotide
  Target: SCNA; (+) strand; PAM type: YTN; PAM sequence: CTT
cctctttccccttcccctcc

SEQ ID NO: 82847 - DNA, 20 bp, Artificial Sequence
  Description of Artificial Sequence: Synthetic oligonucleotide
  Target: SCNA; (+) strand; PAM type: YTN; PAM sequence: TTC
ctctttccccttcccctccc

SEQ ID NO: 82848 - DNA, 20 bp, Artificial Sequence
  Description of Artificial Sequence: Synthetic oligonucleotide
  Target: SCNA; (+) strand; PAM type: YTN; PAM sequence: CTC
tttccccttcccctcccttc

SEQ ID NO: 82849 - DNA, 20 bp, Artificial Sequence
  Description of Artificial Sequence: Synthetic oligonucleotide
  Target: SCNA; (+) strand; PAM type: YTN; PAM sequence: CTT
tccccttcccctcccttctt

SEQ ID NO: 82850 - DNA, 20 bp, Artificial Sequence
  Description of Artificial Sequence: Synthetic oligonucleotide
  Target: SCNA; (+) strand; PAM type: YTN; PAM sequence: TTT
ccccttcccctcccttcttg

SEQ ID NO: 82851 - DNA, 20 bp, Artificial Sequence
  Description of Artificial Sequence: Synthetic oligonucleotide
  Target: SCNA; (+) strand; PAM type: YTN; PAM sequence: TTC
cccttcccctcccttcttgt

SEQ ID NO: 82852 - DNA, 20 bp, Artificial Sequence
  Description of Artificial Sequence: Synthetic oligonucleotide
  Target: SCNA; (+) strand; PAM type: YTN; PAM sequence: CTT
cccctcccttcttgtccccg

SEQ ID NO: 82853 - DNA, 20 bp, Artificial Sequence
  Description of Artificial Sequence: Synthetic oligonucleotide
  Target: SCNA; (+) strand; PAM type: YTN; PAM sequence: TTC
ccctcccttcttgtccccgc

SEQ ID NO: 82854 - DNA, 20 bp, Artificial Sequence
  Description of Artificial Sequence: Synthetic oligonucleotide
  Target: SCNA; (+) strand; PAM type: YTN; PAM sequence: CTC
ccttcttgtccccgcctttc

SEQ ID NO: 82855 - DNA, 20 bp, Artificial Sequence
  Description of Artificial Sequence: Synthetic oligonucleotide
  Target: SCNA; (+) strand; PAM type: YTN; PAM sequence: CTT
cttgtccccgcctttcctct

SEQ ID NO: 82856 - DNA, 20 bp, Artificial Sequence
  Description of Artificial Sequence: Synthetic oligonucleotide
  Target: SCNA; (+) strand; PAM type: YTN; PAM sequence: TTC
ttgtccccgcctttcctctg

SEQ ID NO: 82857 - DNA, 20 bp, Artificial Sequence
  Description of Artificial Sequence: Synthetic oligonucleotide
  Target: SCNA; (+) strand; PAM type: YTN; PAM sequence: CTT
gtccccgcctttcctctggg

SEQ ID NO: 82858 - DNA, 20 bp, Artificial Sequence
  Description of Artificial Sequence: Synthetic oligonucleotide
  Target: SCNA; (+) strand; PAM type: YTN; PAM sequence: TTG
tccccgcctttcctctgggt

SEQ ID NO: 82859 - DNA, 20 bp, Artificial Sequence
  Description of Artificial Sequence: Synthetic oligonucleotide
  Target: SCNA; (+) strand; PAM type: YTN; PAM sequence: CTT
tcctctgggtcctcccgggg

SEQ ID NO: 82860 - DNA, 20 bp, Artificial Sequence
  Description of Artificial Sequence: Synthetic oligonucleotide
  Target: SCNA; (+) strand; PAM type: YTN; PAM sequence: TTT
cctctgggtcctcccgggga

SEQ ID NO: 82861 - DNA, 20 bp, Artificial Sequence
  Description of Artificial Sequence: Synthetic oligonucleotide
  Target: SCNA; (+) strand; PAM type: YTN; PAM sequence: TTC
ctctgggtcctcccggggac

SEQ ID NO: 82862 - DNA, 20 bp, Artificial Sequence
  Description of Artificial Sequence: Synthetic oligonucleotide
  Target: SCNA; (+) strand; PAM type: YTN; PAM sequence: CTC
tgggtcctcccggggaccac

SEQ ID NO: 82863 - DNA, 20 bp, Artificial Sequence
  Description of Artificial Sequence: Synthetic oligonucleotide
  Target: SCNA; (+) strand; PAM type: YTN; PAM sequence: CTG
ggtcctcccggggaccaccc

SEQ ID NO: 82864 - DNA, 20 bp, Artificial Sequence
  Description of Artificial Sequence: Synthetic oligonucleotide
  Target: SCNA; (+) strand; PAM type: YTN; PAM sequence: CTC
ccggggaccaccccctaccc

SEQ ID NO: 82865 - DNA, 20 bp, Artificial Sequence
  Description of Artificial Sequence: Synthetic oligonucleotide
  Target: SCNA; (+) strand; PAM type: YTN; PAM sequence: CTA
cccctcgtcagagtcgccct

SEQ ID NO: 82866 - DNA, 20 bp, Artificial Sequence
  Description of Artificial Sequence: Synthetic oligonucleotide
  Target: SCNA; (+) strand; PAM type: YTN; PAM sequence: CTC
gtcagagtcgccctgggaga

SEQ ID NO: 82867 - DNA, 20 bp, Artificial Sequence
  Description of Artificial Sequence: Synthetic oligonucleotide
  Target: SCNA; (+) strand; PAM type: YTN; PAM sequence: CTG
ggagagccgagggcctgagg

SEQ ID NO: 82868 - DNA, 20 bp, Artificial Sequence
  Description of Artificial Sequence: Synthetic oligonucleotide
  Target: SCNA; (+) strand; PAM type: YTN; PAM sequence: CTG
agggtcgaccaccaagggca

SEQ ID NO: 82869 - DNA, 20 bp, Artificial Sequence
  Description of Artificial Sequence: Synthetic oligonucleotide
  Target: SCNA; (+) strand; PAM type: YTN; PAM sequence: CTA
tcccttggggagctgctgga

SEQ ID NO: 82870 - DNA, 20 bp, Artificial Sequence
  Description of Artificial Sequence: Synthetic oligonucleotide
  Target: SCNA; (+) strand; PAM type: YTN; PAM sequence: CTT
ggggagctgctggaggagac

SEQ ID NO: 82871 - DNA, 20 bp, Artificial Sequence
  Description of Artificial Sequence: Synthetic oligonucleotide
  Target: SCNA; (+) strand; PAM type: YTN; PAM sequence: TTG
gggagctgctggaggagaca

SEQ ID NO: 82872 - DNA, 20 bp, Artificial Sequence
  Description of Artificial Sequence: Synthetic oligonucleotide
  Target: SCNA; (+) strand; PAM type: YTN; PAM sequence: CTG
ctggaggagacaggcagcgc

SEQ ID NO: 82873 - DNA, 20 bp, Artificial Sequence
  Description of Artificial Sequence: Synthetic oligonucleotide
  Target: SCNA; (+) strand; PAM type: YTN; PAM sequence: CTG
gaggagacaggcagcgccgg

SEQ ID NO: 82874 - DNA, 20 bp, Artificial Sequence
  Description of Artificial Sequence: Synthetic oligonucleotide
  Target: SCNA; (+) strand; PAM type: YTN; PAM sequence: CTC
acaccgcaccgccgagagcg

SEQ ID NO: 82875 - DNA, 20 bp, Artificial Sequence
  Description of Artificial Sequence: Synthetic oligonucleotide
  Target: SCNA; (+) strand; PAM type: YTN; PAM sequence: CTT
tgccctcgcatcgctgaaat

SEQ ID NO: 82876 - DNA, 20 bp, Artificial Sequence
  Description of Artificial Sequence: Synthetic oligonucleotide
  Target: SCNA; (+) strand; PAM type: YTN; PAM sequence: TTT
gccctcgcatcgctgaaatt

SEQ ID NO: 82877 - DNA, 20 bp, Artificial Sequence
  Description of Artificial Sequence: Synthetic oligonucleotide
  Target: SCNA; (+) strand; PAM type: YTN; PAM sequence: TTG
ccctcgcatcgctgaaattt

SEQ ID NO: 82878 - DNA, 20 bp, Artificial Sequence
  Description of Artificial Sequence: Synthetic oligonucleotide
  Target: SCNA; (+) strand; PAM type: YTN; PAM sequence: CTC
gcatcgctgaaatttaatca

SEQ ID NO: 82879 - DNA, 20 bp, Artificial Sequence
  Description of Artificial Sequence: Synthetic oligonucleotide
  Target: SCNA; (+) strand; PAM type: YTN; PAM sequence: CTG
aaatttaatcacggtcacag

SEQ ID NO: 82880 - DNA, 20 bp, Artificial Sequence
  Description of Artificial Sequence: Synthetic oligonucleotide
  Target: SCNA; (+) strand; PAM type: YTN; PAM sequence: TTT
aatcacggtcacaggttaca

SEQ ID NO: 82881 - DNA, 20 bp, Artificial Sequence
  Description of Artificial Sequence: Synthetic oligonucleotide
  Target: SCNA; (+) strand; PAM type: YTN; PAM sequence: TTA
atcacggtcacaggttacaa

SEQ ID NO: 82882 - DNA, 20 bp, Artificial Sequence
  Description of Artificial Sequence: Synthetic oligonucleotide
  Target: SCNA; (+) strand; PAM type: YTN; PAM sequence: TTA
caacgttaggggtcgcttta

SEQ ID NO: 82883 - DNA, 20 bp, Artificial Sequence
  Description of Artificial Sequence: Synthetic oligonucleotide
  Target: SCNA; (+) strand; PAM type: YTN; PAM sequence: TTA
ggggtcgctttagttcaaat

SEQ ID NO: 82884 - DNA, 20 bp, Artificial Sequence
  Description of Artificial Sequence: Synthetic oligonucleotide
  Target: SCNA; (+) strand; PAM type: YTN; PAM sequence: CTT
tagttcaaatatcttcaagg

SEQ ID NO: 82885 - DNA, 20 bp, Artificial Sequence
  Description of Artificial Sequence: Synthetic oligonucleotide
  Target: SCNA; (+) strand; PAM type: YTN; PAM sequence: TTT
agttcaaatatcttcaaggt

SEQ ID NO: 82886 - DNA, 20 bp, Artificial Sequence
  Description of Artificial Sequence: Synthetic oligonucleotide
  Target: SCNA; (+) strand; PAM type: YTN; PAM sequence: TTA
gttcaaatatcttcaaggtt

SEQ ID NO: 82887 - DNA, 20 bp, Artificial Sequence
  Description of Artificial Sequence: Synthetic oligonucleotide
  Target: SCNA; (+) strand; PAM type: YTN; PAM sequence: TTC
aaatatcttcaaggttttcg

SEQ ID NO: 82888 - DNA, 20 bp, Artificial Sequence
  Description of Artificial Sequence: Synthetic oligonucleotide
  Target: SCNA; (+) strand; PAM type: YTN; PAM sequence: CTT
caaggttttcgtttgctctt

SEQ ID NO: 82889 - DNA, 20 bp, Artificial Sequence
  Description of Artificial Sequence: Synthetic oligonucleotide
  Target: SCNA; (+) strand; PAM type: YTN; PAM sequence: TTC
aaggttttcgtttgctctta

SEQ ID NO: 82890 - DNA, 20 bp, Artificial Sequence
  Description of Artificial Sequence: Synthetic oligonucleotide
  Target: SCNA; (+) strand; PAM type: YTN; PAM sequence: TTT
tcgtttgctcttaatctagg

SEQ ID NO: 82891 - DNA, 20 bp, Artificial Sequence
  Description of Artificial Sequence: Synthetic oligonucleotide
  Target: SCNA; (+) strand; PAM type: YTN; PAM sequence: TTT
cgtttgctcttaatctagga

SEQ ID NO: 82892 - DNA, 20 bp, Artificial Sequence
  Description of Artificial Sequence: Synthetic oligonucleotide
  Target: SCNA; (+) strand; PAM type: YTN; PAM sequence: TTC
gtttgctcttaatctaggaa

SEQ ID NO: 82893 - DNA, 20 bp, Artificial Sequence
  Description of Artificial Sequence: Synthetic oligonucleotide
  Target: SCNA; (+) strand; PAM type: YTN; PAM sequence: TTT
gctcttaatctaggaagagc

SEQ ID NO: 82894 - DNA, 20 bp, Artificial Sequence
  Description of Artificial Sequence: Synthetic oligonucleotide
  Target: SCNA; (+) strand; PAM type: YTN; PAM sequence: TTG
ctcttaatctaggaagagcc

SEQ ID NO: 82895 - DNA, 20 bp, Artificial Sequence
  Description of Artificial Sequence: Synthetic oligonucleotide
  Target: SCNA; (+) strand; PAM type: YTN; PAM sequence: CTC
ttaatctaggaagagccgga

SEQ ID NO: 82896 - DNA, 20 bp, Artificial Sequence
  Description of Artificial Sequence: Synthetic oligonucleotide
  Target: SCNA; (+) strand; PAM type: YTN; PAM sequence: CTT
aatctaggaagagccggaaa

SEQ ID NO: 82897 - DNA, 20 bp, Artificial Sequence
  Description of Artificial Sequence: Synthetic oligonucleotide
  Target: SCNA; (+) strand; PAM type: YTN; PAM sequence: TTA
atctaggaagagccggaaag

SEQ ID NO: 82898 - DNA, 20 bp, Artificial Sequence
  Description of Artificial Sequence: Synthetic oligonucleotide
  Target: SCNA; (+) strand; PAM type: YTN; PAM sequence: CTA
ggaagagccggaaagggtcc

SEQ ID NO: 82899 - DNA, 20 bp, Artificial Sequence
  Description of Artificial Sequence: Synthetic oligonucleotide
  Target: SCNA; (+) strand; PAM type: YTN; PAM sequence: CTG
agggtgaaagggagactact

SEQ ID NO: 82900 - DNA, 20 bp, Artificial Sequence
  Description of Artificial Sequence: Synthetic oligonucleotide
  Target: SCNA; (+) strand; PAM type: YTN; PAM sequence: CTA
ctaaggaagagtcacaggtt

SEQ ID NO: 82901 - DNA, 20 bp, Artificial Sequence
  Description of Artificial Sequence: Synthetic oligonucleotide
  Target: SCNA; (+) strand; PAM type: YTN; PAM sequence: CTA
aggaagagtcacaggttgag

SEQ ID NO: 82902 - DNA, 20 bp, Artificial Sequence
  Description of Artificial Sequence: Synthetic oligonucleotide
  Target: SCNA; (+) strand; PAM type: YTN; PAM sequence: TTG
aggaggcaggagaaggctca

SEQ ID NO: 82903 - DNA, 20 bp, Artificial Sequence
  Description of Artificial Sequence: Synthetic oligonucleotide
  Target: SCNA; (+) strand; PAM type: YTN; PAM sequence: CTC
agcaaatcctctttccacgc

SEQ ID NO: 82904 - DNA, 20 bp, Artificial Sequence
  Description of Artificial Sequence: Synthetic oligonucleotide
  Target: SCNA; (+) strand; PAM type: YTN; PAM sequence: CTC
tttccacgccactatcacca

SEQ ID NO: 82905 - DNA, 20 bp, Artificial Sequence
  Description of Artificial Sequence: Synthetic oligonucleotide
  Target: SCNA; (+) strand; PAM type: YTN; PAM sequence: CTT
tccacgccactatcaccatt

SEQ ID NO: 82906 - DNA, 20 bp, Artificial Sequence
  Description of Artificial Sequence: Synthetic oligonucleotide
  Target: SCNA; (+) strand; PAM type: YTN; PAM sequence: TTT
ccacgccactatcaccattt

SEQ ID NO: 82907 - DNA, 20 bp, Artificial Sequence
  Description of Artificial Sequence: Synthetic oligonucleotide
  Target: SCNA; (+) strand; PAM type: YTN; PAM sequence: TTC
cacgccactatcaccatttt

SEQ ID NO: 82908 - DNA, 20 bp, Artificial Sequence
  Description of Artificial Sequence: Synthetic oligonucleotide
  Target: SCNA; (+) strand; PAM type: YTN; PAM sequence: CTA
tcaccattttcctttccacc

SEQ ID NO: 82909 - DNA, 20 bp, Artificial Sequence
  Description of Artificial Sequence: Synthetic oligonucleotide
  Target: SCNA; (+) strand; PAM type: YTN; PAM sequence: TTT
tcctttccaccaatcagcgc

SEQ ID NO: 82910 - DNA, 20 bp, Artificial Sequence
  Description of Artificial Sequence: Synthetic oligonucleotide
  Target: SCNA; (+) strand; PAM type: YTN; PAM sequence: TTT
cctttccaccaatcagcgcc

SEQ ID NO: 82911 - DNA, 20 bp, Artificial Sequence
  Description of Artificial Sequence: Synthetic oligonucleotide
  Target: SCNA; (+) strand; PAM type: YTN; PAM sequence: TTC
ctttccaccaatcagcgcct

SEQ ID NO: 82912 - DNA, 20 bp, Artificial Sequence
  Description of Artificial Sequence: Synthetic oligonucleotide
  Target: SCNA; (+) strand; PAM type: YTN; PAM sequence: CTT
tccaccaatcagcgcctgcc

SEQ ID NO: 82913 - DNA, 20 bp, Artificial Sequence
  Description of Artificial Sequence: Synthetic oligonucleotide
  Target: SCNA; (+) strand; PAM type: YTN; PAM sequence: TTT
ccaccaatcagcgcctgcca

SEQ ID NO: 82914 - DNA, 20 bp, Artificial Sequence
  Description of Artificial Sequence: Synthetic oligonucleotide
  Target: SCNA; (+) strand; PAM type: YTN; PAM sequence: TTC
caccaatcagcgcctgccag

SEQ ID NO: 82915 - DNA, 20 bp, Artificial Sequence
  Description of Artificial Sequence: Synthetic oligonucleotide
  Target: SCNA; (+) strand; PAM type: YTN; PAM sequence: CTG
ccagacgctgattttcccat

SEQ ID NO: 82916 - DNA, 20 bp, Artificial Sequence
  Description of Artificial Sequence: Synthetic oligonucleotide
  Target: SCNA; (+) strand; PAM type: YTN; PAM sequence: CTG
attttcccatcagtggaaca

SEQ ID NO: 82917 - DNA, 20 bp, Artificial Sequence
  Description of Artificial Sequence: Synthetic oligonucleotide
  Target: SCNA; (+) strand; PAM type: YTN; PAM sequence: TTT
tcccatcagtggaacaagga

SEQ ID NO: 82918 - DNA, 20 bp, Artificial Sequence
  Description of Artificial Sequence: Synthetic oligonucleotide
  Target: SCNA; (+) strand; PAM type: YTN; PAM sequence: TTT
cccatcagtggaacaaggaa

SEQ ID NO: 82919 - DNA, 20 bp, Artificial Sequence
  Description of Artificial Sequence: Synthetic oligonucleotide
  Target: SCNA; (+) strand; PAM type: YTN; PAM sequence: TTC
ccatcagtggaacaaggaat

SEQ ID NO: 82920 - DNA, 20 bp, Artificial Sequence
  Description of Artificial Sequence: Synthetic oligonucleotide
  Target: SCNA; (+) strand; PAM type: YTN; PAM sequence: TTC
cccagccgtctaaaacaagc

SEQ ID NO: 82921 - DNA, 20 bp, Artificial Sequence
  Description of Artificial Sequence: Synthetic oligonucleotide
  Target: SCNA; (+) strand; PAM type: YTN; PAM sequence: CTA
aaacaagcggtcctaaggct

SEQ ID NO: 82922 - DNA, 20 bp, Artificial Sequence
  Description of Artificial Sequence: Synthetic oligonucleotide
  Target: SCNA; (+) strand; PAM type: YTN; PAM sequence: CTA
aggcttttcgctctagaaat

SEQ ID NO: 82923 - DNA, 20 bp, Artificial Sequence
  Description of Artificial Sequence: Synthetic oligonucleotide
  Target: SCNA; (+) strand; PAM type: YTN; PAM sequence: CTT
ttcgctctagaaatgggact

SEQ ID NO: 82924 - DNA, 20 bp, Artificial Sequence
  Description of Artificial Sequence: Synthetic oligonucleotide
  Target: SCNA; (+) strand; PAM type: YTN; PAM sequence: TTT
tcgctctagaaatgggactt

SEQ ID NO: 82925 - DNA, 20 bp, Artificial Sequence
  Description of Artificial Sequence: Synthetic oligonucleotide
  Target: SCNA; (+) strand; PAM type: YTN; PAM sequence: TTT
cgctctagaaatgggactta

SEQ ID NO: 82926 - DNA, 20 bp, Artificial Sequence
  Description of Artificial Sequence: Synthetic oligonucleotide
  Target: SCNA; (+) strand; PAM type: YTN; PAM sequence: TTC
gctctagaaatgggacttac

SEQ ID NO: 82927 - DNA, 20 bp, Artificial Sequence
  Description of Artificial Sequence: Synthetic oligonucleotide
  Target: SCNA; (+) strand; PAM type: YTN; PAM sequence: CTC
tagaaatgggacttactttg

SEQ ID NO: 82928 - DNA, 20 bp, Artificial Sequence
  Description of Artificial Sequence: Synthetic oligonucleotide
  Target: SCNA; (+) strand; PAM type: YTN; PAM sequence: CTA
gaaatgggacttactttgca

SEQ ID NO: 82929 - DNA, 20 bp, Artificial Sequence
  Description of Artificial Sequence: Synthetic oligonucleotide
  Target: SCNA; (+) strand; PAM type: YTN; PAM sequence: CTT
actttgcagacctcccttta

SEQ ID NO: 82930 - DNA, 20 bp, Artificial Sequence
  Description of Artificial Sequence: Synthetic oligonucleotide
  Target: SCNA; (+) strand; PAM type: YTN; PAM sequence: TTA
ctttgcagacctccctttat

SEQ ID NO: 82931 - DNA, 20 bp, Artificial Sequence
  Description of Artificial Sequence: Synthetic oligonucleotide
  Target: SCNA; (+) strand; PAM type: YTN; PAM sequence: CTT
tgcagacctccctttatctg

SEQ ID NO: 82932 - DNA, 20 bp, Artificial Sequence
  Description of Artificial Sequence: Synthetic oligonucleotide
  Target: SCNA; (+) strand; PAM type: YTN; PAM sequence: TTT
gcagacctccctttatctgg

SEQ ID NO: 82933 - DNA, 20 bp, Artificial Sequence
  Description of Artificial Sequence: Synthetic oligonucleotide
  Target: SCNA; (+) strand; PAM type: YTN; PAM sequence: TTG
cagacctccctttatctggg

SEQ ID NO: 82934 - DNA, 20 bp, Artificial Sequence
  Description of Artificial Sequence: Synthetic oligonucleotide
  Target: SCNA; (+) strand; PAM type: YTN; PAM sequence: CTC
cctttatctgggagacaaat

SEQ ID NO: 82935 - DNA, 20 bp, Artificial Sequence
  Description of Artificial Sequence: Synthetic oligonucleotide
  Target: SCNA; (+) strand; PAM type: YTN; PAM sequence: CTT
tatctgggagacaaatccag

SEQ ID NO: 82936 - DNA, 20 bp, Artificial Sequence
  Description of Artificial Sequence: Synthetic oligonucleotide
  Target: SCNA; (+) strand; PAM type: YTN; PAM sequence: TTT
atctgggagacaaatccagc

SEQ ID NO: 82937 - DNA, 20 bp, Artificial Sequence
  Description of Artificial Sequence: Synthetic oligonucleotide
  Target: SCNA; (+) strand; PAM type: YTN; PAM sequence: TTA
tctgggagacaaatccagcg

SEQ ID NO: 82938 - DNA, 20 bp, Artificial Sequence
  Description of Artificial Sequence: Synthetic oligonucleotide
  Target: SCNA; (+) strand; PAM type: YTN; PAM sequence: CTG
ggagacaaatccagcgtgat

SEQ ID NO: 82939 - DNA, 20 bp, Artificial Sequence
  Description of Artificial Sequence: Synthetic oligonucleotide
  Target: SCNA; (+) strand; PAM type: YTN; PAM sequence: TTT
agcctaccggaccatcatat

SEQ ID NO: 82940 - DNA, 20 bp, Artificial Sequence
  Description of Artificial Sequence: Synthetic oligonucleotide
  Target: SCNA; (+) strand; PAM type: YTN; PAM sequence: TTA
gcctaccggaccatcatatc

SEQ ID NO: 82941 - DNA, 20 bp, Artificial Sequence
  Description of Artificial Sequence: Synthetic oligonucleotide
  Target: SCNA; (+) strand; PAM type: YTN; PAM sequence: CTA
ccggaccatcatatccaatt

SEQ ID NO: 82942 - DNA, 20 bp, Artificial Sequence
  Description of Artificial Sequence: Synthetic oligonucleotide
  Target: SCNA; (+) strand; PAM type: YTN; PAM sequence: TTT
cttcttcagccccttctgaa

SEQ ID NO: 82943 - DNA, 20 bp, Artificial Sequence
  Description of Artificial Sequence: Synthetic oligonucleotide
  Target: SCNA; (+) strand; PAM type: YTN; PAM sequence: TTC
ttcttcagccccttctgaaa

SEQ ID NO: 82944 - DNA, 20 bp, Artificial Sequence
  Description of Artificial Sequence: Synthetic oligonucleotide
  Target: SCNA; (+) strand; PAM type: YTN; PAM sequence: CTT
cttcagccccttctgaaagg

SEQ ID NO: 82945 - DNA, 20 bp, Artificial Sequence
  Description of Artificial Sequence: Synthetic oligonucleotide
  Target: SCNA; (+) strand; PAM type: YTN; PAM sequence: TTC
ttcagccccttctgaaaggg

SEQ ID NO: 82946 - DNA, 20 bp, Artificial Sequence
  Description of Artificial Sequence: Synthetic oligonucleotide
  Target: SCNA; (+) strand; PAM type: YTN; PAM sequence: CTT
cagccccttctgaaagggag

SEQ ID NO: 82947 - DNA, 20 bp, Artificial Sequence
  Description of Artificial Sequence: Synthetic oligonucleotide
  Target: SCNA; (+) strand; PAM type: YTN; PAM sequence: TTC
agccccttctgaaagggaga

SEQ ID NO: 82948 - DNA, 20 bp, Artificial Sequence
  Description of Artificial Sequence: Synthetic oligonucleotide
  Target: SCNA; (+) strand; PAM type: YTN; PAM sequence: CTT
ctgaaagggagatgctacac

SEQ ID NO: 82949 - DNA, 20 bp, Artificial Sequence
  Description of Artificial Sequence: Synthetic oligonucleotide
  Target: SCNA; (+) strand; PAM type: YTN; PAM sequence: TTC
tgaaagggagatgctacaca

SEQ ID NO: 82950 - DNA, 20 bp, Artificial Sequence
  Description of Artificial Sequence: Synthetic oligonucleotide
  Target: SCNA; (+) strand; PAM type: YTN; PAM sequence: CTG
aaagggagatgctacacacc

SEQ ID NO: 82951 - DNA, 20 bp, Artificial Sequence
  Description of Artificial Sequence: Synthetic oligonucleotide
  Target: SCNA; (+) strand; PAM type: YTN; PAM sequence: CTA
cacaccactcacctttctga

SEQ ID NO: 82952 - DNA, 20 bp, Artificial Sequence
  Description of Artificial Sequence: Synthetic oligonucleotide
  Target: SCNA; (+) strand; PAM type: YTN; PAM sequence: CTC
acctttctgacttctgattc

SEQ ID NO: 82953 - DNA, 20 bp, Artificial Sequence
  Description of Artificial Sequence: Synthetic oligonucleotide
  Target: SCNA; (+) strand; PAM type: YTN; PAM sequence: CTT
tctgacttctgattctcgtt

SEQ ID NO: 82954 - DNA, 20 bp, Artificial Sequence
  Description of Artificial Sequence: Synthetic oligonucleotide
  Target: SCNA; (+) strand; PAM type: YTN; PAM sequence: TTT
ctgacttctgattctcgttg

SEQ ID NO: 82955 - DNA, 20 bp, Artificial Sequence
  Description of Artificial Sequence: Synthetic oligonucleotide
  Target: SCNA; (+) strand; PAM type: YTN; PAM sequence: TTC
tgacttctgattctcgttgc

SEQ ID NO: 82956 - DNA, 20 bp, Artificial Sequence
  Description of Artificial Sequence: Synthetic oligonucleotide
  Target: SCNA; (+) strand; PAM type: YTN; PAM sequence: CTG
acttctgattctcgttgccc

SEQ ID NO: 82957 - DNA, 20 bp, Artificial Sequence
  Description of Artificial Sequence: Synthetic oligonucleotide
  Target: SCNA; (+) strand; PAM type: YTN; PAM sequence: CTT
ctgattctcgttgccctcag

SEQ ID NO: 82958 - DNA, 20 bp, Artificial Sequence
  Description of Artificial Sequence: Synthetic oligonucleotide
  Target: SCNA; (+) strand; PAM type: YTN; PAM sequence: TTC
tgattctcgttgccctcaga

SEQ ID NO: 82959 - DNA, 20 bp, Artificial Sequence
  Description of Artificial Sequence: Synthetic oligonucleotide
  Target: SCNA; (+) strand; PAM type: YTN; PAM sequence: CTG
attctcgttgccctcagaat

SEQ ID NO: 82960 - DNA, 20 bp, Artificial Sequence
  Description of Artificial Sequence: Synthetic oligonucleotide
  Target: SCNA; (+) strand; PAM type: YTN; PAM sequence: TTC
tcgttgccctcagaattgac

SEQ ID NO: 82961 - DNA, 20 bp, Artificial Sequence
  Description of Artificial Sequence: Synthetic oligonucleotide
  Target: SCNA; (+) strand; PAM type: YTN; PAM sequence: CTC
gttgccctcagaattgacac

SEQ ID NO: 82962 - DNA, 20 bp, Artificial Sequence
  Description of Artificial Sequence: Synthetic oligonucleotide
  Target: SCNA; (+) strand; PAM type: YTN; PAM sequence: TTG
ccctcagaattgacaccccc

SEQ ID NO: 82963 - DNA, 20 bp, Artificial Sequence
  Description of Artificial Sequence: Synthetic oligonucleotide
  Target: SCNA; (+) strand; PAM type: YTN; PAM sequence: CTC
agaattgacacccccttttc

SEQ ID NO: 82964 - DNA, 20 bp, Artificial Sequence
  Description of Artificial Sequence: Synthetic oligonucleotide
  Target: SCNA; (+) strand; PAM type: YTN; PAM sequence: TTG
acacccccttttctctcccc

SEQ ID NO: 82965 - DNA, 20 bp, Artificial Sequence
  Description of Artificial Sequence: Synthetic oligonucleotide
  Target: SCNA; (+) strand; PAM type: YTN; PAM sequence: CTT
ttctctccccccacccacca

SEQ ID NO: 82966 - DNA, 20 bp, Artificial Sequence
  Description of Artificial Sequence: Synthetic oligonucleotide
  Target: SCNA; (+) strand; PAM type: YTN; PAM sequence: TTT
tctctccccccacccaccac

SEQ ID NO: 82967 - DNA, 20 bp, Artificial Sequence
  Description of Artificial Sequence: Synthetic oligonucleotide
  Target: SCNA; (+) strand; PAM type: YTN; PAM sequence: TTT
ctctccccccacccaccaca

SEQ ID NO: 82968 - DNA, 20 bp, Artificial Sequence
  Description of Artificial Sequence: Synthetic oligonucleotide
  Target: SCNA; (+) strand; PAM type: YTN; PAM sequence: TTC
tctccccccacccaccacac

SEQ ID NO: 82969 - DNA, 20 bp, Artificial Sequence
  Description of Artificial Sequence: Synthetic oligonucleotide
  Target: SCNA; (+) strand; PAM type: YTN; PAM sequence: CTC
tccccccacccaccacacgc

SEQ ID NO: 82970 - DNA, 20 bp, Artificial Sequence
  Description of Artificial Sequence: Synthetic oligonucleotide
  Target: SCNA; (+) strand; PAM type: YTN; PAM sequence: CTC
cccccacccaccacacgcac

SEQ ID NO: 82971 - DNA, 20 bp, Artificial Sequence
  Description of Artificial Sequence: Synthetic oligonucleotide
  Target: SCNA; (+) strand; PAM type: YTN; PAM sequence: CTT
caagacaatttttgcatcgc

SEQ ID NO: 82972 - DNA, 20 bp, Artificial Sequence
  Description of Artificial Sequence: Synthetic oligonucleotide
  Target: SCNA; (+) strand; PAM type: YTN; PAM sequence: TTC
aagacaatttttgcatcgct

SEQ ID NO: 82973 - DNA, 20 bp, Artificial Sequence
  Description of Artificial Sequence: Synthetic oligonucleotide
  Target: SCNA; (+) strand; PAM type: YTN; PAM sequence: TTT
ttgcatcgcttaacacattt

SEQ ID NO: 82974 - DNA, 20 bp, Artificial Sequence
  Description of Artificial Sequence: Synthetic oligonucleotide
  Target: SCNA; (+) strand; PAM type: YTN; PAM sequence: TTT
tgcatcgcttaacacatttt

SEQ ID NO: 82975 - DNA, 20 bp, Artificial Sequence
  Description of Artificial Sequence: Synthetic oligonucleotide
  Target: SCNA; (+) strand; PAM type: YTN; PAM sequence: TTT
gcatcgcttaacacattttc

SEQ ID NO: 82976 - DNA, 20 bp, Artificial Sequence
  Description of Artificial Sequence: Synthetic oligonucleotide
  Target: SCNA; (+) strand; PAM type: YTN; PAM sequence: TTG
catcgcttaacacattttca

SEQ ID NO: 82977 - DNA, 20 bp, Artificial Sequence
  Description of Artificial Sequence: Synthetic oligonucleotide
  Target: SCNA; (+) strand; PAM type: YTN; PAM sequence: CTT
aacacattttcacctctttc

SEQ ID NO: 82978 - DNA, 20 bp, Artificial Sequence
  Description of Artificial Sequence: Synthetic oligonucleotide
  Target: SCNA; (+) strand; PAM type: YTN; PAM sequence: TTA
acacattttcacctctttca

SEQ ID NO: 82979 - DNA, 20 bp, Artificial Sequence
  Description of Artificial Sequence: Synthetic oligonucleotide
  Target: SCNA; (+) strand; PAM type: YTN; PAM sequence: TTT
tcacctctttcagagctgga

SEQ ID NO: 82980 - DNA, 20 bp, Artificial Sequence
  Description of Artificial Sequence: Synthetic oligonucleotide
  Target: SCNA; (+) strand; PAM type: YTN; PAM sequence: TTT
cacctctttcagagctggaa

SEQ ID NO: 82981 - DNA, 20 bp, Artificial Sequence
  Description of Artificial Sequence: Synthetic oligonucleotide
  Target: SCNA; (+) strand; PAM type: YTN; PAM sequence: TTC
acctctttcagagctggaag

SEQ ID NO: 82982 - DNA, 20 bp, Artificial Sequence
  Description of Artificial Sequence: Synthetic oligonucleotide
  Target: SCNA; (+) strand; PAM type: YTN; PAM sequence: CTC
tttcagagctggaagacagc

SEQ ID NO: 82983 - DNA, 20 bp, Artificial Sequence
  Description of Artificial Sequence: Synthetic oligonucleotide
  Target: SCNA; (+) strand; PAM type: YTN; PAM sequence: CTT
tcagagctggaagacagctg

SEQ ID NO: 82984 - DNA, 20 bp, Artificial Sequence
  Description of Artificial Sequence: Synthetic oligonucleotide
  Target: SCNA; (+) strand; PAM type: YTN; PAM sequence: TTT
cagagctggaagacagctgt

SEQ ID NO: 82985 - DNA, 20 bp, Artificial Sequence
  Description of Artificial Sequence: Synthetic oligonucleotide
  Target: SCNA; (+) strand; PAM type: YTN; PAM sequence: TTC
agagctggaagacagctgtt

SEQ ID NO: 82986 - DNA, 20 bp, Artificial Sequence
  Description of Artificial Sequence: Synthetic oligonucleotide
  Target: SCNA; (+) strand; PAM type: YTN; PAM sequence: CTG
gaagacagctgttcctggat

SEQ ID NO: 82987 - DNA, 20 bp, Artificial Sequence
  Description of Artificial Sequence: Synthetic oligonucleotide
  Target: SCNA; (+) strand; PAM type: YTN; PAM sequence: CTG
ttcctggatcacaccagaat

SEQ ID NO: 82988 - DNA, 20 bp, Artificial Sequence
  Description of Artificial Sequence: Synthetic oligonucleotide
  Target: SCNA; (+) strand; PAM type: YTN; PAM sequence: TTC
ctggatcacaccagaatgga

SEQ ID NO: 82989 - DNA, 20 bp, Artificial Sequence
  Description of Artificial Sequence: Synthetic oligonucleotide
  Target: SCNA; (+) strand; PAM type: YTN; PAM sequence: CTG
gatcacaccagaatggagaa

SEQ ID NO: 82990 - DNA, 20 bp, Artificial Sequence
  Description of Artificial Sequence: Synthetic oligonucleotide
  Target: SCNA; (+) strand; PAM type: YTN; PAM sequence: CTC
ctcccactagcagaaagcct

SEQ ID NO: 82991 - DNA, 20 bp, Artificial Sequence
  Description of Artificial Sequence: Synthetic oligonucleotide
  Target: SCNA; (+) strand; PAM type: YTN; PAM sequence: CTC
ccactagcagaaagcctttg

SEQ ID NO: 82992 - DNA, 20 bp, Artificial Sequence
  Description of Artificial Sequence: Synthetic oligonucleotide
  Target: SCNA; (+) strand; PAM type: YTN; PAM sequence: CTA
gcagaaagcctttgctttct

SEQ ID NO: 82993 - DNA, 20 bp, Artificial Sequence
  Description of Artificial Sequence: Synthetic oligonucleotide
  Target: SCNA; (+) strand; PAM type: YTN; PAM sequence: CTT
tgctttctgtgcctggattc

SEQ ID NO: 82994 - DNA, 20 bp, Artificial Sequence
  Description of Artificial Sequence: Synthetic oligonucleotide
  Target: SCNA; (+) strand; PAM type: YTN; PAM sequence: TTT
gctttctgtgcctggattcg

SEQ ID NO: 82995 - DNA, 20 bp, Artificial Sequence
  Description of Artificial Sequence: Synthetic oligonucleotide
  Target: SCNA; (+) strand; PAM type: YTN; PAM sequence: TTG
ctttctgtgcctggattcgg

SEQ ID NO: 82996 - DNA, 20 bp, Artificial Sequence
  Description of Artificial Sequence: Synthetic oligonucleotide
  Target: SCNA; (+) strand; PAM type: YTN; PAM sequence: CTT
tctgtgcctggattcggaag

SEQ ID NO: 82997 - DNA, 20 bp, Artificial Sequence
  Description of Artificial Sequence: Synthetic oligonucleotide
  Target: SCNA; (+) strand; PAM type: YTN; PAM sequence: TTT
ctgtgcctggattcggaaga

SEQ ID NO: 82998 - DNA, 20 bp, Artificial Sequence
  Description of Artificial Sequence: Synthetic oligonucleotide
  Target: SCNA; (+) strand; PAM type: YTN; PAM sequence: TTC
tgtgcctggattcggaagat

SEQ ID NO: 82999 - DNA, 20 bp, Artificial Sequence
  Description of Artificial Sequence: Synthetic oligonucleotide
  Target: SCNA; (+) strand; PAM type: YTN; PAM sequence: CTG
tgcctggattcggaagatta

SEQ ID NO: 83000 - DNA, 20 bp, Artificial Sequence
  Description of Artificial Sequence: Synthetic oligonucleotide
  Target: SCNA; (+) strand; PAM type: YTN; PAM sequence: CTG
gattcggaagattagttaag

SEQ ID NO: 83001 - DNA, 20 bp, Artificial Sequence
  Description of Artificial Sequence: Synthetic oligonucleotide
  Target: SCNA; (+) strand; PAM type: YTN; PAM sequence: TTC
ggaagattagttaagcactg

SEQ ID NO: 83002 - DNA, 20 bp, Artificial Sequence
  Description of Artificial Sequence: Synthetic oligonucleotide
  Target: SCNA; (+) strand; PAM type: YTN; PAM sequence: TTA
gttaagcactggaagaggag

SEQ ID NO: 83003 - DNA, 20 bp, Artificial Sequence
  Description of Artificial Sequence: Synthetic oligonucleotide
  Target: SCNA; (+) strand; PAM type: YTN; PAM sequence: TTA
agcactggaagaggaggggg

SEQ ID NO: 83004 - DNA, 20 bp, Artificial Sequence
  Description of Artificial Sequence: Synthetic oligonucleotide
  Target: SCNA; (+) strand; PAM type: YTN; PAM sequence: CTG
gaagaggaggggggaaacaa

SEQ ID NO: 83005 - DNA, 20 bp, Artificial Sequence
  Description of Artificial Sequence: Synthetic oligonucleotide
  Target: SCNA; (+) strand; PAM type: YTN; PAM sequence: CTC
gtttttgctgtatgtttttt

SEQ ID NO: 83006 - DNA, 20 bp, Artificial Sequence
  Description of Artificial Sequence: Synthetic oligonucleotide
  Target: SCNA; (+) strand; PAM type: YTN; PAM sequence: TTT
ttgctgtatgtttttttttt

SEQ ID NO: 83007 - DNA, 20 bp, Artificial Sequence
  Description of Artificial Sequence: Synthetic oligonucleotide
  Target: SCNA; (+) strand; PAM type: YTN; PAM sequence: TTT
tgctgtatgtttttttttta

SEQ ID NO: 83008 - DNA, 20 bp, Artificial Sequence
  Description of Artificial Sequence: Synthetic oligonucleotide
  Target: SCNA; (+) strand; PAM type: YTN; PAM sequence: TTT
gctgtatgttttttttttaa

SEQ ID NO: 83009 - DNA, 20 bp, Artificial Sequence
  Description of Artificial Sequence: Synthetic oligonucleotide
  Target: SCNA; (+) strand; PAM type: YTN; PAM sequence: TTG
ctgtatgttttttttttaat

SEQ ID NO: 83010 - DNA, 20 bp, Artificial Sequence
  Description of Artificial Sequence: Synthetic oligonucleotide
  Target: SCNA; (+) strand; PAM type: YTN; PAM sequence: CTG
tatgttttttttttaattgt

SEQ ID NO: 83011 - DNA, 20 bp, Artificial Sequence
  Description of Artificial Sequence: Synthetic oligonucleotide
  Target: SCNA; (+) strand; PAM type: YTN; PAM sequence: TTT
tttttttaattgtttttata

SEQ ID NO: 83012 - DNA, 20 bp, Artificial Sequence
  Description of Artificial Sequence: Synthetic oligonucleotide
  Target: SCNA; (+) strand; PAM type: YTN; PAM sequence: TTT
ttttttaattgtttttatat

SEQ ID NO: 83013 - DNA, 20 bp, Artificial Sequence
  Description of Artificial Sequence: Synthetic oligonucleotide
  Target: SCNA; (+) strand; PAM type: YTN; PAM sequence: TTT
tttttaattgtttttatatt

SEQ ID NO: 83014 - DNA, 20 bp, Artificial Sequence
  Description of Artificial Sequence: Synthetic oligonucleotide
  Target: SCNA; (+) strand; PAM type: YTN; PAM sequence: TTT
ttttaattgtttttatattt

SEQ ID NO: 83015 - DNA, 20 bp, Artificial Sequence
  Description of Artificial Sequence: Synthetic oligonucleotide
  Target: SCNA; (+) strand; PAM type: YTN; PAM sequence: TTT
tttaattgtttttatattta

SEQ ID NO: 83016 - DNA, 20 bp, Artificial Sequence
  Description of Artificial Sequence: Synthetic oligonucleotide
  Target: SCNA; (+) strand; PAM type: YTN; PAM sequence: TTT
ttaattgtttttatatttat

SEQ ID NO: 83017 - DNA, 20 bp, Artificial Sequence
  Description of Artificial Sequence: Synthetic oligonucleotide
  Target: SCNA; (+) strand; PAM type: YTN; PAM sequence: TTT
taattgtttttatatttata

SEQ ID NO: 83018 - DNA, 20 bp, Artificial Sequence
  Description of Artificial Sequence: Synthetic oligonucleotide
  Target: SCNA; (+) strand; PAM type: YTN; PAM sequence: TTT
aattgtttttatatttatag

SEQ ID NO: 83019 - DNA, 20 bp, Artificial Sequence
  Description of Artificial Sequence: Synthetic oligonucleotide
  Target: SCNA; (+) strand; PAM type: YTN; PAM sequence: TTA
attgtttttatatttataga

SEQ ID NO: 83020 - DNA, 20 bp, Artificial Sequence
  Description of Artificial Sequence: Synthetic oligonucleotide
  Target: SCNA; (+) strand; PAM type: YTN; PAM sequence: TTG
tttttatatttatagaaagt

SEQ ID NO: 83021 - DNA, 20 bp, Artificial Sequence
  Description of Artificial Sequence: Synthetic oligonucleotide
  Target: SCNA; (+) strand; PAM type: YTN; PAM sequence: TTT
ttatatttatagaaagttat

SEQ ID NO: 83022 - DNA, 20 bp, Artificial Sequence
  Description of Artificial Sequence: Synthetic oligonucleotide
  Target: SCNA; (+) strand; PAM type: YTN; PAM sequence: TTT
tatatttatagaaagttatg

SEQ ID NO: 83023 - DNA, 20 bp, Artificial Sequence
  Description of Artificial Sequence: Synthetic oligonucleotide
  Target: SCNA; (+) strand; PAM type: YTN; PAM sequence: TTT
atatttatagaaagttatgc

SEQ ID NO: 83024 - DNA, 20 bp, Artificial Sequence
  Description of Artificial Sequence: Synthetic oligonucleotide
  Target: SCNA; (+) strand; PAM type: YTN; PAM sequence: TTA
tatttatagaaagttatgct

SEQ ID NO: 83025 - DNA, 20 bp, Artificial Sequence
  Description of Artificial Sequence: Synthetic oligonucleotide
  Target: SCNA; (+) strand; PAM type: YTN; PAM sequence: TTT
atagaaagttatgctttgtc

SEQ ID NO: 83026 - DNA, 20 bp, Artificial Sequence
  Description of Artificial Sequence: Synthetic oligonucleotide
  Target: SCNA; (+) strand; PAM type: YTN; PAM sequence: TTA
tagaaagttatgctttgtct

SEQ ID NO: 83027 - DNA, 20 bp, Artificial Sequence
  Description of Artificial Sequence: Synthetic oligonucleotide
  Target: SCNA; (+) strand; PAM type: YTN; PAM sequence: TTA
tgctttgtctgattcttgcg

SEQ ID NO: 83028 - DNA, 20 bp, Artificial Sequence
  Description of Artificial Sequence: Synthetic oligonucleotide
  Target: SCNA; (+) strand; PAM type: YTN; PAM sequence: CTT
tgtctgattcttgcgctaat

SEQ ID NO: 83029 - DNA, 20 bp, Artificial Sequence
  Description of Artificial Sequence: Synthetic oligonucleotide
  Target: SCNA; (+) strand; PAM type: YTN; PAM sequence: TTT
gtctgattcttgcgctaatt

SEQ ID NO: 83030 - DNA, 20 bp, Artificial Sequence
  Description of Artificial Sequence: Synthetic oligonucleotide
  Target: SCNA; (+) strand; PAM type: YTN; PAM sequence: TTG
tctgattcttgcgctaattt

SEQ ID NO: 83031 - DNA, 20 bp, Artificial Sequence
  Description of Artificial Sequence: Synthetic oligonucleotide
  Target: SCNA; (+) strand; PAM type: YTN; PAM sequence: CTG
attcttgcgctaatttgggt

SEQ ID NO: 83032 - DNA, 20 bp, Artificial Sequence
  Description of Artificial Sequence: Synthetic oligonucleotide
  Target: SCNA; (+) strand; PAM type: YTN; PAM sequence: TTC
ttgcgctaatttgggttctg

SEQ ID NO: 83033 - DNA, 20 bp, Artificial Sequence
  Description of Artificial Sequence: Synthetic oligonucleotide
  Target: SCNA; (+) strand; PAM type: YTN; PAM sequence: CTT
gcgctaatttgggttctgaa

SEQ ID NO: 83034 - DNA, 20 bp, Artificial Sequence
  Description of Artificial Sequence: Synthetic oligonucleotide
  Target: SCNA; (+) strand; PAM type: YTN; PAM sequence: TTG
cgctaatttgggttctgaaa

SEQ ID NO: 83035 - DNA, 20 bp, Artificial Sequence
  Description of Artificial Sequence: Synthetic oligonucleotide
  Target: SCNA; (+) strand; PAM type: YTN; PAM sequence: CTA
atttgggttctgaaatttga

SEQ ID NO: 83036 - DNA, 20 bp, Artificial Sequence
  Description of Artificial Sequence: Synthetic oligonucleotide
  Target: SCNA; (+) strand; PAM type: YTN; PAM sequence: TTT
gggttctgaaatttgagtaa

SEQ ID NO: 83037 - DNA, 20 bp, Artificial Sequence
  Description of Artificial Sequence: Synthetic oligonucleotide
  Target: SCNA; (+) strand; PAM type: YTN; PAM sequence: TTG
ggttctgaaatttgagtaaa

SEQ ID NO: 83038 - DNA, 20 bp, Artificial Sequence
  Description of Artificial Sequence: Synthetic oligonucleotide
  Target: SCNA; (+) strand; PAM type: YTN; PAM sequence: TTC
tgaaatttgagtaaaatcaa

SEQ ID NO: 83039 - DNA, 20 bp, Artificial Sequence
  Description of Artificial Sequence: Synthetic oligonucleotide
  Target: SCNA; (+) strand; PAM type: YTN; PAM sequence: CTG
aaatttgagtaaaatcaaat

SEQ ID NO: 83040 - DNA, 20 bp, Artificial Sequence
  Description of Artificial Sequence: Synthetic oligonucleotide
  Target: SCNA; (+) strand; PAM type: YTN; PAM sequence: TTT
gagtaaaatcaaatttaaac

SEQ ID NO: 83041 - DNA, 20 bp, Artificial Sequence
  Description of Artificial Sequence: Synthetic oligonucleotide
  Target: SCNA; (+) strand; PAM type: YTN; PAM sequence: TTG
agtaaaatcaaatttaaaca

SEQ ID NO: 83042 - DNA, 20 bp, Artificial Sequence
  Description of Artificial Sequence: Synthetic oligonucleotide
  Target: SCNA; (+) strand; PAM type: YTN; PAM sequence: TTT
aaacatacaaaacaacttta

SEQ ID NO: 83043 - DNA, 20 bp, Artificial Sequence
  Description of Artificial Sequence: Synthetic oligonucleotide
  Target: SCNA; (+) strand; PAM type: YTN; PAM sequence: TTA
aacatacaaaacaactttaa

SEQ ID NO: 83044 - DNA, 20 bp, Artificial Sequence
  Description of Artificial Sequence: Synthetic oligonucleotide
  Target: SCNA; (+) strand; PAM type: YTN; PAM sequence: CTT
taaaaccacaaggaacagga

SEQ ID NO: 83045 - DNA, 20 bp, Artificial Sequence
  Description of Artificial Sequence: Synthetic oligonucleotide
  Target: SCNA; (+) strand; PAM type: YTN; PAM sequence: TTT
aaaaccacaaggaacaggaa

SEQ ID NO: 83046 - DNA, 20 bp, Artificial Sequence
  Description of Artificial Sequence: Synthetic oligonucleotide
  Target: SCNA; (+) strand; PAM type: YTN; PAM sequence: TTA
aaaccacaaggaacaggaag

SEQ ID NO: 83047 - DNA, 20 bp, Artificial Sequence
  Description of Artificial Sequence: Synthetic oligonucleotide
  Target: SCNA; (+) strand; PAM type: YTN; PAM sequence: TTA
tacataaaagacatatagaa

SEQ ID NO: 83048 - DNA, 20 bp, Artificial Sequence
  Description of Artificial Sequence: Synthetic oligonucleotide
  Target: SCNA; (+) strand; PAM type: YTN; PAM sequence: TTC
agtggaaaatagaaaagcat

SEQ ID NO: 83049 - DNA, 20 bp, Artificial Sequence
  Description of Artificial Sequence: Synthetic oligonucleotide
  Target: SCNA; (+) strand; PAM type: YTN; PAM sequence: TTT
attatttaaactcttccttg

SEQ ID NO: 83050 - DNA, 20 bp, Artificial Sequence
  Description of Artificial Sequence: Synthetic oligonucleotide
  Target: SCNA; (+) strand; PAM type: YTN; PAM sequence: TTA
ttatttaaactcttccttga

SEQ ID NO: 83051 - DNA, 20 bp, Artificial Sequence
  Description of Artificial Sequence: Synthetic oligonucleotide
  Target: SCNA; (+) strand; PAM type: YTN; PAM sequence: TTA
tttaaactcttccttgaact

SEQ ID NO: 83052 - DNA, 20 bp, Artificial Sequence
  Description of Artificial Sequence: Synthetic oligonucleotide
  Target: SCNA; (+) strand; PAM type: YTN; PAM sequence: TTT
aaactcttccttgaactatt

SEQ ID NO: 83053 - DNA, 20 bp, Artificial Sequence
  Description of Artificial Sequence: Synthetic oligonucleotide
  Target: SCNA; (+) strand; PAM type: YTN; PAM sequence: TTA
aactcttccttgaactattg

SEQ ID NO: 83054 - DNA, 20 bp, Artificial Sequence
  Description of Artificial Sequence: Synthetic oligonucleotide
  Target: SCNA; (+) strand; PAM type: YTN; PAM sequence: CTC
ttccttgaactattggtctg

SEQ ID NO: 83055 - DNA, 20 bp, Artificial Sequence
  Description of Artificial Sequence: Synthetic oligonucleotide
  Target: SCNA; (+) strand; PAM type: YTN; PAM sequence: CTT
ccttgaactattggtctgcc

SEQ ID NO: 83056 - DNA, 20 bp, Artificial Sequence
  Description of Artificial Sequence: Synthetic oligonucleotide
  Target: SCNA; (+) strand; PAM type: YTN; PAM sequence: TTC
cttgaactattggtctgccc

SEQ ID NO: 83057 - DNA, 20 bp, Artificial Sequence
  Description of Artificial Sequence: Synthetic oligonucleotide
  Target: SCNA; (+) strand; PAM type: YTN; PAM sequence: CTT
gaactattggtctgcccttt

SEQ ID NO: 83058 - DNA, 20 bp, Artificial Sequence
  Description of Artificial Sequence: Synthetic oligonucleotide
  Target: SCNA; (+) strand; PAM type: YTN; PAM sequence: TTG
aactattggtctgccctttg

SEQ ID NO: 83059 - DNA, 20 bp, Artificial Sequence
  Description of Artificial Sequence: Synthetic oligonucleotide
  Target: SCNA; (+) strand; PAM type: YTN; PAM sequence: CTA
ttggtctgccctttggaaaa

SEQ ID NO: 83060 - DNA, 20 bp, Artificial Sequence
  Description of Artificial Sequence: Synthetic oligonucleotide
  Target: SCNA; (+) strand; PAM type: YTN; PAM sequence: TTG
gtctgccctttggaaaagca

SEQ ID NO: 83061 - DNA, 20 bp, Artificial Sequence
  Description of Artificial Sequence: Synthetic oligonucleotide
  Target: SCNA; (+) strand; PAM type: YTN; PAM sequence: CTG
ccctttggaaaagcagactt

SEQ ID NO: 83062 - DNA, 20 bp, Artificial Sequence
  Description of Artificial Sequence: Synthetic oligonucleotide
  Target: SCNA; (+) strand; PAM type: YTN; PAM sequence: CTT
tggaaaagcagactttcctt

SEQ ID NO: 83063 - DNA, 20 bp, Artificial Sequence
  Description of Artificial Sequence: Synthetic oligonucleotide
  Target: SCNA; (+) strand; PAM type: YTN; PAM sequence: TTT
ggaaaagcagactttcctta

SEQ ID NO: 83064 - DNA, 20 bp, Artificial Sequence
  Description of Artificial Sequence: Synthetic oligonucleotide
  Target: SCNA; (+) strand; PAM type: YTN; PAM sequence: TTG
gaaaagcagactttccttaa

SEQ ID NO: 83065 - DNA, 20 bp, Artificial Sequence
  Description of Artificial Sequence: Synthetic oligonucleotide
  Target: SCNA; (+) strand; PAM type: YTN; PAM sequence: CTT
tccttaatgcagtagctcat

SEQ ID NO: 83066 - DNA, 20 bp, Artificial Sequence
  Description of Artificial Sequence: Synthetic oligonucleotide
  Target: SCNA; (+) strand; PAM type: YTN; PAM sequence: TTT
ccttaatgcagtagctcata

SEQ ID NO: 83067 - DNA, 20 bp, Artificial Sequence
  Description of Artificial Sequence: Synthetic oligonucleotide
  Target: SCNA; (+) strand; PAM type: YTN; PAM sequence: TTC
cttaatgcagtagctcatat

SEQ ID NO: 83068 - DNA, 20 bp, Artificial Sequence
  Description of Artificial Sequence: Synthetic oligonucleotide
  Target: SCNA; (+) strand; PAM type: YTN; PAM sequence: CTT
aatgcagtagctcatattaa

SEQ ID NO: 83069 - DNA, 20 bp, Artificial Sequence
  Description of Artificial Sequence: Synthetic oligonucleotide
  Target: SCNA; (+) strand; PAM type: YTN; PAM sequence: TTA
atgcagtagctcatattaat

SEQ ID NO: 83070 - DNA, 20 bp, Artificial Sequence
  Description of Artificial Sequence: Synthetic oligonucleotide
  Target: SCNA; (+) strand; PAM type: YTN; PAM sequence: CTC
atattaatattttttgtttg

SEQ ID NO: 83071 - DNA, 20 bp, Artificial Sequence
  Description of Artificial Sequence: Synthetic oligonucleotide
  Target: SCNA; (+) strand; PAM type: YTN; PAM sequence: TTA
atattttttgtttgcttagg

SEQ ID NO: 83072 - DNA, 20 bp, Artificial Sequence
  Description of Artificial Sequence: Synthetic oligonucleotide
  Target: SCNA; (+) strand; PAM type: YTN; PAM sequence: TTT
tttgtttgcttaggaccaga

SEQ ID NO: 83073 - DNA, 20 bp, Artificial Sequence
  Description of Artificial Sequence: Synthetic oligonucleotide
  Target: SCNA; (+) strand; PAM type: YTN; PAM sequence: TTT
ttgtttgcttaggaccagag

SEQ ID NO: 83074 - DNA, 20 bp, Artificial Sequence
  Description of Artificial Sequence: Synthetic oligonucleotide
  Target: SCNA; (+) strand; PAM type: YTN; PAM sequence: TTT
tgtttgcttaggaccagagc

SEQ ID NO: 83075 - DNA, 20 bp, Artificial Sequence
  Description of Artificial Sequence: Synthetic oligonucleotide
  Target: SCNA; (+) strand; PAM type: YTN; PAM sequence: TTT
gtttgcttaggaccagagca

SEQ ID NO: 83076 - DNA, 20 bp, Artificial Sequence
  Description of Artificial Sequence: Synthetic oligonucleotide
  Target: SCNA; (+) strand; PAM type: YTN; PAM sequence: TTG
tttgcttaggaccagagcaa

SEQ ID NO: 83077 - DNA, 20 bp, Artificial Sequence
  Description of Artificial Sequence: Synthetic oligonucleotide
  Target: SCNA; (+) strand; PAM type: YTN; PAM sequence: TTT
gcttaggaccagagcaagaa

SEQ ID NO: 83078 - DNA, 20 bp, Artificial Sequence
  Description of Artificial Sequence: Synthetic oligonucleotide
  Target: SCNA; (+) strand; PAM type: YTN; PAM sequence: TTG
cttaggaccagagcaagaag

SEQ ID NO: 83079 - DNA, 20 bp, Artificial Sequence
  Description of Artificial Sequence: Synthetic oligonucleotide
  Target: SCNA; (+) strand; PAM type: YTN; PAM sequence: CTT
aggaccagagcaagaaggtt

SEQ ID NO: 83080 - DNA, 20 bp, Artificial Sequence
  Description of Artificial Sequence: Synthetic oligonucleotide
  Target: SCNA; (+) strand; PAM type: YTN; PAM sequence: TTA
ggaccagagcaagaaggttg

SEQ ID NO: 83081 - DNA, 20 bp, Artificial Sequence
  Description of Artificial Sequence: Synthetic oligonucleotide
  Target: SCNA; (+) strand; PAM type: YTN; PAM sequence: TTG
gacttgggagctagtttgct

SEQ ID NO: 83082 - DNA, 20 bp, Artificial Sequence
  Description of Artificial Sequence: Synthetic oligonucleotide
  Target: SCNA; (+) strand; PAM type: YTN; PAM sequence: CTT
gggagctagtttgctgtctg

SEQ ID NO: 83083 - DNA, 20 bp, Artificial Sequence
  Description of Artificial Sequence: Synthetic oligonucleotide
  Target: SCNA; (+) strand; PAM type: YTN; PAM sequence: TTG
ggagctagtttgctgtctgg

SEQ ID NO: 83084 - DNA, 20 bp, Artificial Sequence
  Description of Artificial Sequence: Synthetic oligonucleotide
  Target: SCNA; (+) strand; PAM type: YTN; PAM sequence: CTA
gtttgctgtctggctttgag

SEQ ID NO: 83085 - DNA, 20 bp, Artificial Sequence
  Description of Artificial Sequence: Synthetic oligonucleotide
  Target: SCNA; (+) strand; PAM type: YTN; PAM sequence: TTT
gctgtctggctttgagacct

SEQ ID NO: 83086 - DNA, 20 bp, Artificial Sequence
  Description of Artificial Sequence: Synthetic oligonucleotide
  Target: SCNA; (+) strand; PAM type: YTN; PAM sequence: TTG
ctgtctggctttgagacctt

SEQ ID NO: 83087 - DNA, 20 bp, Artificial Sequence
  Description of Artificial Sequence: Synthetic oligonucleotide
  Target: SCNA; (+) strand; PAM type: YTN; PAM sequence: CTG
tctggctttgagaccttgaa

SEQ ID NO: 83088 - DNA, 20 bp, Artificial Sequence
  Description of Artificial Sequence: Synthetic oligonucleotide
  Target: SCNA; (+) strand; PAM type: YTN; PAM sequence: CTG
gctttgagaccttgaacaag

SEQ ID NO: 83089 - DNA, 20 bp, Artificial Sequence
  Description of Artificial Sequence: Synthetic oligonucleotide
  Target: SCNA; (+) strand; PAM type: YTN; PAM sequence: CTT
tgagaccttgaacaagtttt

SEQ ID NO: 83090 - DNA, 20 bp, Artificial Sequence
  Description of Artificial Sequence: Synthetic oligonucleotide
  Target: SCNA; (+) strand; PAM type: YTN; PAM sequence: TTT
gagaccttgaacaagttttg

SEQ ID NO: 83091 - DNA, 20 bp, Artificial Sequence
  Description of Artificial Sequence: Synthetic oligonucleotide
  Target: SCNA; (+) strand; PAM type: YTN; PAM sequence: TTG
agaccttgaacaagttttgt

SEQ ID NO: 83092 - DNA, 20 bp, Artificial Sequence
  Description of Artificial Sequence: Synthetic oligonucleotide
  Target: SCNA; (+) strand; PAM type: YTN; PAM sequence: CTT
gaacaagttttgttctcctt

SEQ ID NO: 83093 - DNA, 20 bp, Artificial Sequence
  Description of Artificial Sequence: Synthetic oligonucleotide
  Target: SCNA; (+) strand; PAM type: YTN; PAM sequence: TTG
aacaagttttgttctccttc

SEQ ID NO: 83094 - DNA, 20 bp, Artificial Sequence
  Description of Artificial Sequence: Synthetic oligonucleotide
  Target: SCNA; (+) strand; PAM type: YTN; PAM sequence: TTT
tgttctccttctgtttccag

SEQ ID NO: 83095 - DNA, 20 bp, Artificial Sequence
  Description of Artificial Sequence: Synthetic oligonucleotide
  Target: SCNA; (+) strand; PAM type: YTN; PAM sequence: TTT
gttctccttctgtttccagt

SEQ ID NO: 83096 - DNA, 20 bp, Artificial Sequence
  Description of Artificial Sequence: Synthetic oligonucleotide
  Target: SCNA; (+) strand; PAM type: YTN; PAM sequence: TTG
ttctccttctgtttccagtt

SEQ ID NO: 83097 - DNA, 20 bp, Artificial Sequence
  Description of Artificial Sequence: Synthetic oligonucleotide
  Target: SCNA; (+) strand; PAM type: YTN; PAM sequence: TTC
tccttctgtttccagttttc

SEQ ID NO: 83098 - DNA, 20 bp, Artificial Sequence
  Description of Artificial Sequence: Synthetic oligonucleotide
  Target: SCNA; (+) strand; PAM type: YTN; PAM sequence: CTC
cttctgtttccagttttctt

SEQ ID NO: 83099 - DNA, 20 bp, Artificial Sequence
  Description of Artificial Sequence: Synthetic oligonucleotide
  Target: SCNA; (+) strand; PAM type: YTN; PAM sequence: CTT
ctgtttccagttttcttttt

SEQ ID NO: 83100 - DNA, 20 bp, Artificial Sequence
  Description of Artificial Sequence: Synthetic oligonucleotide
  Target: SCNA; (+) strand; PAM type: YTN; PAM sequence: TTC
tgtttccagttttctttttt

SEQ ID NO: 83101 - DNA, 20 bp, Artificial Sequence
  Description of Artificial Sequence: Synthetic oligonucleotide
  Target: SCNA; (+) strand; PAM type: YTN; PAM sequence: CTG
tttccagttttcttttttgt

SEQ ID NO: 83102 - DNA, 20 bp, Artificial Sequence
  Description of Artificial Sequence: Synthetic oligonucleotide
  Target: SCNA; (+) strand; PAM type: YTN; PAM sequence: TTT
ccagttttcttttttgtaaa

SEQ ID NO: 83103 - DNA, 20 bp, Artificial Sequence
  Description of Artificial Sequence: Synthetic oligonucleotide
  Target: SCNA; (+) strand; PAM type: YTN; PAM sequence: TTC
cagttttcttttttgtaaat

SEQ ID NO: 83104 - DNA, 20 bp, Artificial Sequence
  Description of Artificial Sequence: Synthetic oligonucleotide
  Target: SCNA; (+) strand; PAM type: YTN; PAM sequence: TTT
tcttttttgtaaattaggag

SEQ ID NO: 83105 - DNA, 20 bp, Artificial Sequence
  Description of Artificial Sequence: Synthetic oligonucleotide
  Target: SCNA; (+) strand; PAM type: YTN; PAM sequence: TTT
cttttttgtaaattaggaga

SEQ ID NO: 83106 - DNA, 20 bp, Artificial Sequence
  Description of Artificial Sequence: Synthetic oligonucleotide
  Target: SCNA; (+) strand; PAM type: YTN; PAM sequence: TTC
ttttttgtaaattaggagat

SEQ ID NO: 83107 - DNA, 20 bp, Artificial Sequence
  Description of Artificial Sequence: Synthetic oligonucleotide
  Target: SCNA; (+) strand; PAM type: YTN; PAM sequence: CTT
ttttgtaaattaggagatta

SEQ ID NO: 83108 - DNA, 20 bp, Artificial Sequence
  Description of Artificial Sequence: Synthetic oligonucleotide
  Target: SCNA; (+) strand; PAM type: YTN; PAM sequence: TTT
tttgtaaattaggagattaa

SEQ ID NO: 83109 - DNA, 20 bp, Artificial Sequence
  Description of Artificial Sequence: Synthetic oligonucleotide
  Target: SCNA; (+) strand; PAM type: YTN; PAM sequence: TTT
ttgtaaattaggagattaac

SEQ ID NO: 83110 - DNA, 20 bp, Artificial Sequence
  Description of Artificial Sequence: Synthetic oligonucleotide
  Target: SCNA; (+) strand; PAM type: YTN; PAM sequence: TTT
tgtaaattaggagattaact

SEQ ID NO: 83111 - DNA, 20 bp, Artificial Sequence
  Description of Artificial Sequence: Synthetic oligonucleotide
  Target: SCNA; (+) strand; PAM type: YTN; PAM sequence: TTT
gtaaattaggagattaactc

SEQ ID NO: 83112 - DNA, 20 bp, Artificial Sequence
  Description of Artificial Sequence: Synthetic oligonucleotide
  Target: SCNA; (+) strand; PAM type: YTN; PAM sequence: TTG
taaattaggagattaactca

SEQ ID NO: 83113 - DNA, 20 bp, Artificial Sequence
  Description of Artificial Sequence: Synthetic oligonucleotide
  Target: SCNA; (+) strand; PAM type: YTN; PAM sequence: TTA
ggagattaactcatgtgatc

SEQ ID NO: 83114 - DNA, 20 bp, Artificial Sequence
  Description of Artificial Sequence: Synthetic oligonucleotide
  Target: SCNA; (+) strand; PAM type: YTN; PAM sequence: TTA
actcatgtgatcactctatt

SEQ ID NO: 83115 - DNA, 20 bp, Artificial Sequence
  Description of Artificial Sequence: Synthetic oligonucleotide
  Target: SCNA; (+) strand; PAM type: YTN; PAM sequence: CTC
atgtgatcactctattttca

SEQ ID NO: 83116 - DNA, 20 bp, Artificial Sequence
  Description of Artificial Sequence: Synthetic oligonucleotide
  Target: SCNA; (+) strand; PAM type: YTN; PAM sequence: CTC
tattttcaactttttgttat

SEQ ID NO: 83117 - DNA, 20 bp, Artificial Sequence
  Description of Artificial Sequence: Synthetic oligonucleotide
  Target: SCNA; (+) strand; PAM type: YTN; PAM sequence: CTA
ttttcaactttttgttatgg

SEQ ID NO: 83118 - DNA, 20 bp, Artificial Sequence
  Description of Artificial Sequence: Synthetic oligonucleotide
  Target: SCNA; (+) strand; PAM type: YTN; PAM sequence: TTT
tcaactttttgttatgggaa

SEQ ID NO: 83119 - DNA, 20 bp, Artificial Sequence
  Description of Artificial Sequence: Synthetic oligonucleotide
  Target: SCNA; (+) strand; PAM type: YTN; PAM sequence: TTT
caactttttgttatgggaaa

SEQ ID NO: 83120 - DNA, 20 bp, Artificial Sequence
  Description of Artificial Sequence: Synthetic oligonucleotide
  Target: SCNA; (+) strand; PAM type: YTN; PAM sequence: TTC
aactttttgttatgggaaat

SEQ ID NO: 83121 - DNA, 20 bp, Artificial Sequence
  Description of Artificial Sequence: Synthetic oligonucleotide
  Target: SCNA; (+) strand; PAM type: YTN; PAM sequence: CTT
tttgttatgggaaatattca

SEQ ID NO: 83122 - DNA, 20 bp, Artificial Sequence
  Description of Artificial Sequence: Synthetic oligonucleotide
  Target: SCNA; (+) strand; PAM type: YTN; PAM sequence: TTT
ttgttatgggaaatattcaa

SEQ ID NO: 83123 - DNA, 20 bp, Artificial Sequence
  Description of Artificial Sequence: Synthetic oligonucleotide
  Target: SCNA; (+) strand; PAM type: YTN; PAM sequence: TTT
tgttatgggaaatattcaaa

SEQ ID NO: 83124 - DNA, 20 bp, Artificial Sequence
  Description of Artificial Sequence: Synthetic oligonucleotide
  Target: SCNA; (+) strand; PAM type: YTN; PAM sequence: TTT
gttatgggaaatattcaaac

SEQ ID NO: 83125 - DNA, 20 bp, Artificial Sequence
  Description of Artificial Sequence: Synthetic oligonucleotide
  Target: SCNA; (+) strand; PAM type: YTN; PAM sequence: TTG
ttatgggaaatattcaaaca

SEQ ID NO: 83126 - DNA, 20 bp, Artificial Sequence
  Description of Artificial Sequence: Synthetic oligonucleotide
  Target: SCNA; (+) strand; PAM type: YTN; PAM sequence: TTA
tgggaaatattcaaacatat

SEQ ID NO: 83127 - DNA, 20 bp, Artificial Sequence
  Description of Artificial Sequence: Synthetic oligonucleotide
  Target: SCNA; (+) strand; PAM type: YTN; PAM sequence: TTC
aaacatatgcaaaagtagac

SEQ ID NO: 83128 - DNA, 20 bp, Artificial Sequence
  Description of Artificial Sequence: Synthetic oligonucleotide
  Target: SCNA; (+) strand; PAM type: YTN; PAM sequence: CTC
tcatgtgaagatcatccaac

SEQ ID NO: 83129 - DNA, 20 bp, Artificial Sequence
  Description of Artificial Sequence: Synthetic oligonucleotide
  Target: SCNA; (+) strand; PAM type: YTN; PAM sequence: CTC
atgtgaagatcatccaactt

SEQ ID NO: 83130 - DNA, 20 bp, Artificial Sequence
  Description of Artificial Sequence: Synthetic oligonucleotide
  Target: SCNA; (+) strand; PAM type: YTN; PAM sequence: CTT
ttacattttttcaatgcatg

SEQ ID NO: 83131 - DNA, 20 bp, Artificial Sequence
  Description of Artificial Sequence: Synthetic oligonucleotide
  Target: SCNA; (+) strand; PAM type: YTN; PAM sequence: TTT
tacattttttcaatgcatgg

SEQ ID NO: 83132 - DNA, 20 bp, Artificial Sequence
  Description of Artificial Sequence: Synthetic oligonucleotide
  Target: SCNA; (+) strand; PAM type: YTN; PAM sequence: TTT
acattttttcaatgcatggc

SEQ ID NO: 83133 - DNA, 20 bp, Artificial Sequence
  Description of Artificial Sequence: Synthetic oligonucleotide
  Target: SCNA; (+) strand; PAM type: YTN; PAM sequence: TTA
cattttttcaatgcatggct

SEQ ID NO: 83134 - DNA, 20 bp, Artificial Sequence
  Description of Artificial Sequence: Synthetic oligonucleotide
  Target: SCNA; (+) strand; PAM type: YTN; PAM sequence: TTT
tttcaatgcatggctgatca

SEQ ID NO: 83135 - DNA, 20 bp, Artificial Sequence
  Description of Artificial Sequence: Synthetic oligonucleotide
  Target: SCNA; (+) strand; PAM type: YTN; PAM sequence: TTT
ttcaatgcatggctgatcat

SEQ ID NO: 83136 - DNA, 20 bp, Artificial Sequence
  Description of Artificial Sequence: Synthetic oligonucleotide
  Target: SCNA; (+) strand; PAM type: YTN; PAM sequence: TTT
tcaatgcatggctgatcatg

SEQ ID NO: 83137 - DNA, 20 bp, Artificial Sequence
  Description of Artificial Sequence: Synthetic oligonucleotide
  Target: SCNA; (+) strand; PAM type: YTN; PAM sequence: TTT
caatgcatggctgatcatgt

SEQ ID NO: 83138 - DNA, 20 bp, Artificial Sequence
  Description of Artificial Sequence: Synthetic oligonucleotide
  Target: SCNA; (+) strand; PAM type: YTN; PAM sequence: TTC
aatgcatggctgatcatgtc

SEQ ID NO: 83139 - DNA, 20 bp, Artificial Sequence
  Description of Artificial Sequence: Synthetic oligonucleotide
  Target: SCNA; (+) strand; PAM type: YTN; PAM sequence: CTG
atcatgtctcatccataagt

SEQ ID NO: 83140 - DNA, 20 bp, Artificial Sequence
  Description of Artificial Sequence: Synthetic oligonucleotide
  Target: SCNA; (+) strand; PAM type: YTN; PAM sequence: CTC
atccataagtccactcactt

SEQ ID NO: 83141 - DNA, 20 bp, Artificial Sequence
  Description of Artificial Sequence: Synthetic oligonucleotide
  Target: SCNA; (+) strand; PAM type: YTN; PAM sequence: CTC
actttatcactaccaatcct

SEQ ID NO: 83142 - DNA, 20 bp, Artificial Sequence
  Description of Artificial Sequence: Synthetic oligonucleotide
  Target: SCNA; (+) strand; PAM type: YTN; PAM sequence: CTT
tatcactaccaatcctccct

SEQ ID NO: 83143 - DNA, 20 bp, Artificial Sequence
  Description of Artificial Sequence: Synthetic oligonucleotide
  Target: SCNA; (+) strand; PAM type: YTN; PAM sequence: TTT
atcactaccaatcctccctc

SEQ ID NO: 83144 - DNA, 20 bp, Artificial Sequence
  Description of Artificial Sequence: Synthetic oligonucleotide
  Target: SCNA; (+) strand; PAM type: YTN; PAM sequence: TTA
tcactaccaatcctccctct

SEQ ID NO: 83145 - DNA, 20 bp, Artificial Sequence
  Description of Artificial Sequence: Synthetic oligonucleotide
  Target: SCNA; (+) strand; PAM type: YTN; PAM sequence: CTA
ccaatcctccctcttttttt

SEQ ID NO: 83146 - DNA, 20 bp, Artificial Sequence
  Description of Artificial Sequence: Synthetic oligonucleotide
  Target: SCNA; (+) strand; PAM type: YTN; PAM sequence: CTC
cctctttttttttttttttt

SEQ ID NO: 83147 - DNA, 20 bp, Artificial Sequence
  Description of Artificial Sequence: Synthetic oligonucleotide
  Target: SCNA; (+) strand; PAM type: YTN; PAM sequence: CTC
ttttttttttttttttacca

SEQ ID NO: 83148 - DNA, 20 bp, Artificial Sequence
  Description of Artificial Sequence: Synthetic oligonucleotide
  Target: SCNA; (+) strand; PAM type: YTN; PAM sequence: CTT
ttttttttttttttaccaaa

SEQ ID NO: 83149 - DNA, 20 bp, Artificial Sequence
  Description of Artificial Sequence: Synthetic oligonucleotide
  Target: SCNA; (+) strand; PAM type: YTN; PAM sequence: TTT
tttttttttttttaccaaat

SEQ ID NO: 83150 - DNA, 20 bp, Artificial Sequence
  Description of Artificial Sequence: Synthetic oligonucleotide
  Target: SCNA; (+) strand; PAM type: YTN; PAM sequence: TTT
ttttttttttttaccaaatt

SEQ ID NO: 83151 - DNA, 20 bp, Artificial Sequence
  Description of Artificial Sequence: Synthetic oligonucleotide
  Target: SCNA; (+) strand; PAM type: YTN; PAM sequence: TTT
tttttttttttaccaaattc

SEQ ID NO: 83152 - DNA, 20 bp, Artificial Sequence
  Description of Artificial Sequence: Synthetic oligonucleotide
  Target: SCNA; (+) strand; PAM type: YTN; PAM sequence: TTT
ttttttttttaccaaattca

SEQ ID NO: 83153 - DNA, 20 bp, Artificial Sequence
  Description of Artificial Sequence: Synthetic oligonucleotide
  Target: SCNA; (+) strand; PAM type: YTN; PAM sequence: TTT
tttttttttaccaaattcaa

SEQ ID NO: 83154 - DNA, 20 bp, Artificial Sequence
  Description of Artificial Sequence: Synthetic oligonucleotide
  Target: SCNA; (+) strand; PAM type: YTN; PAM sequence: TTT
ttttttttaccaaattcaag

SEQ ID NO: 83155 - DNA, 20 bp, Artificial Sequence
  Description of Artificial Sequence: Synthetic oligonucleotide
  Target: SCNA; (+) strand; PAM type: YTN; PAM sequence: TTT
tttttttaccaaattcaagc

SEQ ID NO: 83156 - DNA, 20 bp, Artificial Sequence
  Description of Artificial Sequence: Synthetic oligonucleotide
  Target: SCNA; (+) strand; PAM type: YTN; PAM sequence: TTT
ttttttaccaaattcaagct

SEQ ID NO: 83157 - DNA, 20 bp, Artificial Sequence
  Description of Artificial Sequence: Synthetic oligonucleotide
  Target: SCNA; (+) strand; PAM type: YTN; PAM sequence: TTT
tttttaccaaattcaagctt

SEQ ID NO: 83158 - DNA, 20 bp, Artificial Sequence
  Description of Artificial Sequence: Synthetic oligonucleotide
  Target: SCNA; (+) strand; PAM type: YTN; PAM sequence: TTT
ttttaccaaattcaagcttt

SEQ ID NO: 83159 - DNA, 20 bp, Artificial Sequence
  Description of Artificial Sequence: Synthetic oligonucleotide
  Target: SCNA; (+) strand; PAM type: YTN; PAM sequence: TTT
tttaccaaattcaagcttta

SEQ ID NO: 83160 - DNA, 20 bp, Artificial Sequence
  Description of Artificial Sequence: Synthetic oligonucleotide
  Target: SCNA; (+) strand; PAM type: YTN; PAM sequence: TTT
ttaccaaattcaagctttat

SEQ ID NO: 83161 - DNA, 20 bp, Artificial Sequence
  Description of Artificial Sequence: Synthetic oligonucleotide
  Target: SCNA; (+) strand; PAM type: YTN; PAM sequence: TTT
taccaaattcaagctttata

SEQ ID NO: 83162 - DNA, 20 bp, Artificial Sequence
  Description of Artificial Sequence: Synthetic oligonucleotide
  Target: SCNA; (+) strand; PAM type: YTN; PAM sequence: TTT
accaaattcaagctttatat

SEQ ID NO: 83163 - DNA, 20 bp, Artificial Sequence
  Description of Artificial Sequence: Synthetic oligonucleotide
  Target: SCNA; (+) strand; PAM type: YTN; PAM sequence: TTA
ccaaattcaagctttatata

SEQ ID NO: 83164 - DNA, 20 bp, Artificial Sequence
  Description of Artificial Sequence: Synthetic oligonucleotide
  Target: SCNA; (+) strand; PAM type: YTN; PAM sequence: TTC
aagctttatatatatctttt

SEQ ID NO: 83165 - DNA, 20 bp, Artificial Sequence
  Description of Artificial Sequence: Synthetic oligonucleotide
  Target: SCNA; (+) strand; PAM type: YTN; PAM sequence: CTT
tatatatatcttttcagctg

SEQ ID NO: 83166 - DNA, 20 bp, Artificial Sequence
  Description of Artificial Sequence: Synthetic oligonucleotide
  Target: SCNA; (+) strand; PAM type: YTN; PAM sequence: TTT
atatatatcttttcagctgt

SEQ ID NO: 83167 - DNA, 20 bp, Artificial Sequence
  Description of Artificial Sequence: Synthetic oligonucleotide
  Target: SCNA; (+) strand; PAM type: YTN; PAM sequence: TTA
tatatatcttttcagctgta

SEQ ID NO: 83168 - DNA, 20 bp, Artificial Sequence
  Description of Artificial Sequence: Synthetic oligonucleotide
  Target: SCNA; (+) strand; PAM type: YTN; PAM sequence: CTT
ttcagctgtaaacattcagt

SEQ ID NO: 83169 - DNA, 20 bp, Artificial Sequence
  Description of Artificial Sequence: Synthetic oligonucleotide
  Target: SCNA; (+) strand; PAM type: YTN; PAM sequence: TTT
tcagctgtaaacattcagta

SEQ ID NO: 83170 - DNA, 20 bp, Artificial Sequence
  Description of Artificial Sequence: Synthetic oligonucleotide
  Target: SCNA; (+) strand; PAM type: YTN; PAM sequence: TTT
cagctgtaaacattcagtat

SEQ ID NO: 83171 - DNA, 20 bp, Artificial Sequence
  Description of Artificial Sequence: Synthetic oligonucleotide
  Target: SCNA; (+) strand; PAM type: YTN; PAM sequence: TTC
agctgtaaacattcagtatg

SEQ ID NO: 83172 - DNA, 20 bp, Artificial Sequence
  Description of Artificial Sequence: Synthetic oligonucleotide
  Target: SCNA; (+) strand; PAM type: YTN; PAM sequence: CTG
taaacattcagtatgcatcc

SEQ ID NO: 83173 - DNA, 20 bp, Artificial Sequence
  Description of Artificial Sequence: Synthetic oligonucleotide
  Target: SCNA; (+) strand; PAM type: YTN; PAM sequence: TTC
agtatgcatccacaaaattt

SEQ ID NO: 83174 - DNA, 20 bp, Artificial Sequence
  Description of Artificial Sequence: Synthetic oligonucleotide
  Target: SCNA; (+) strand; PAM type: YTN; PAM sequence: TTT
aaggactgtttaaaaataac

SEQ ID NO: 83175 - DNA, 20 bp, Artificial Sequence
  Description of Artificial Sequence: Synthetic oligonucleotide
  Target: SCNA; (+) strand; PAM type: YTN; PAM sequence: TTA
aggactgtttaaaaataacc

SEQ ID NO: 83176 - DNA, 20 bp, Artificial Sequence
  Description of Artificial Sequence: Synthetic oligonucleotide
  Target: SCNA; (+) strand; PAM type: YTN; PAM sequence: CTG
tttaaaaataaccacaatat

SEQ ID NO: 83177 - DNA, 20 bp, Artificial Sequence
  Description of Artificial Sequence: Synthetic oligonucleotide
  Target: SCNA; (+) strand; PAM type: YTN; PAM sequence: TTT
aaaaataaccacaatatcat

SEQ ID NO: 83178 - DNA, 20 bp, Artificial Sequence
  Description of Artificial Sequence: Synthetic oligonucleotide
  Target: SCNA; (+) strand; PAM type: YTN; PAM sequence: TTA
aaaataaccacaatatcatt

SEQ ID NO: 83179 - DNA, 20 bp, Artificial Sequence
  Description of Artificial Sequence: Synthetic oligonucleotide
  Target: SCNA; (+) strand; PAM type: YTN; PAM sequence: TTA
gatgattctttaaaattgca

SEQ ID NO: 83180 - DNA, 20 bp, Artificial Sequence
  Description of Artificial Sequence: Synthetic oligonucleotide
  Target: SCNA; (+) strand; PAM type: YTN; PAM sequence: TTC
tttaaaattgcagtgtaatt

SEQ ID NO: 83181 - DNA, 20 bp, Artificial Sequence
  Description of Artificial Sequence: Synthetic oligonucleotide
  Target: SCNA; (+) strand; PAM type: YTN; PAM sequence: CTT
taaaattgcagtgtaattta

SEQ ID NO: 83182 - DNA, 20 bp, Artificial Sequence
  Description of Artificial Sequence: Synthetic oligonucleotide
  Target: SCNA; (+) strand; PAM type: YTN; PAM sequence: TTT
aaaattgcagtgtaatttac

SEQ ID NO: 83183 - DNA, 20 bp, Artificial Sequence
  Description of Artificial Sequence: Synthetic oligonucleotide
  Target: SCNA; (+) strand; PAM type: YTN; PAM sequence: TTA
aaattgcagtgtaatttaca

SEQ ID NO: 83184 - DNA, 20 bp, Artificial Sequence
  Description of Artificial Sequence: Synthetic oligonucleotide
  Target: SCNA; (+) strand; PAM type: YTN; PAM sequence: TTG
cagtgtaatttacacctagg

SEQ ID NO: 83185 - DNA, 20 bp, Artificial Sequence
  Description of Artificial Sequence: Synthetic oligonucleotide
  Target: SCNA; (+) strand; PAM type: YTN; PAM sequence: TTT
acacctagggaaatgctcag

SEQ ID NO: 83186 - DNA, 20 bp, Artificial Sequence
  Description of Artificial Sequence: Synthetic oligonucleotide
  Target: SCNA; (+) strand; PAM type: YTN; PAM sequence: TTA
cacctagggaaatgctcaga

SEQ ID NO: 83187 - DNA, 20 bp, Artificial Sequence
  Description of Artificial Sequence: Synthetic oligonucleotide
  Target: SCNA; (+) strand; PAM type: YTN; PAM sequence: CTA
gggaaatgctcagatgttgt

SEQ ID NO: 83188 - DNA, 20 bp, Artificial Sequence
  Description of Artificial Sequence: Synthetic oligonucleotide
  Target: SCNA; (+) strand; PAM type: YTN; PAM sequence: CTC
agatgttgtgtccctttaaa

SEQ ID NO: 83189 - DNA, 20 bp, Artificial Sequence
  Description of Artificial Sequence: Synthetic oligonucleotide
  Target: SCNA; (+) strand; PAM type: YTN; PAM sequence: TTG
tgtccctttaaatcagtttt

SEQ ID NO: 83190 - DNA, 20 bp, Artificial Sequence
  Description of Artificial Sequence: Synthetic oligonucleotide
  Target: SCNA; (+) strand; PAM type: YTN; PAM sequence: CTT
taaatcagttttgaaaaagc

SEQ ID NO: 83191 - DNA, 20 bp, Artificial Sequence
  Description of Artificial Sequence: Synthetic oligonucleotide
  Target: SCNA; (+) strand; PAM type: YTN; PAM sequence: TTT
aaatcagttttgaaaaagcc

SEQ ID NO: 83192 - DNA, 20 bp, Artificial Sequence
  Description of Artificial Sequence: Synthetic oligonucleotide
  Target: SCNA; (+) strand; PAM type: YTN; PAM sequence: TTA
aatcagttttgaaaaagcca

SEQ ID NO: 83193 - DNA, 20 bp, Artificial Sequence
  Description of Artificial Sequence: Synthetic oligonucleotide
  Target: SCNA; (+) strand; PAM type: YTN; PAM sequence: TTT
tgaaaaagccatgcattagt

SEQ ID NO: 83194 - DNA, 20 bp, Artificial Sequence
  Description of Artificial Sequence: Synthetic oligonucleotide
  Target: SCNA; (+) strand; PAM type: YTN; PAM sequence: TTT
gaaaaagccatgcattagtg

SEQ ID NO: 83195 - DNA, 20 bp, Artificial Sequence
  Description of Artificial Sequence: Synthetic oligonucleotide
  Target: SCNA; (+) strand; PAM type: YTN; PAM sequence: TTG
aaaaagccatgcattagtgt

SEQ ID NO: 83196 - DNA, 20 bp, Artificial Sequence
  Description of Artificial Sequence: Synthetic oligonucleotide
  Target: SCNA; (+) strand; PAM type: YTN; PAM sequence: TTA
gtgtaacccacactattttg

SEQ ID NO: 83197 - DNA, 20 bp, Artificial Sequence
  Description of Artificial Sequence: Synthetic oligonucleotide
  Target: SCNA; (+) strand; PAM type: YTN; PAM sequence: CTA
ttttgaagacacaggacatt

SEQ ID NO: 83198 - DNA, 20 bp, Artificial Sequence
  Description of Artificial Sequence: Synthetic oligonucleotide
  Target: SCNA; (+) strand; PAM type: YTN; PAM sequence: TTT
tgaagacacaggacattttc

SEQ ID NO: 83199 - DNA, 20 bp, Artificial Sequence
  Description of Artificial Sequence: Synthetic oligonucleotide
  Target: SCNA; (+) strand; PAM type: YTN; PAM sequence: TTT
gaagacacaggacattttca

SEQ ID NO: 83200 - DNA, 20 bp, Artificial Sequence
  Description of Artificial Sequence: Synthetic oligonucleotide
  Target: SCNA; (+) strand; PAM type: YTN; PAM sequence: TTG
aagacacaggacattttcat

SEQ ID NO: 83201 - DNA, 20 bp, Artificial Sequence
  Description of Artificial Sequence: Synthetic oligonucleotide
  Target: SCNA; (+) strand; PAM type: YTN; PAM sequence: TTT
tcatcattccagacagttac

SEQ ID NO: 83202 - DNA, 20 bp, Artificial Sequence
  Description of Artificial Sequence: Synthetic oligonucleotide
  Target: SCNA; (+) strand; PAM type: YTN; PAM sequence: TTT
catcattccagacagttacc

SEQ ID NO: 83203 - DNA, 20 bp, Artificial Sequence
  Description of Artificial Sequence: Synthetic oligonucleotide
  Target: SCNA; (+) strand; PAM type: YTN; PAM sequence: TTC
atcattccagacagttacct

SEQ ID NO: 83204 - DNA, 20 bp, Artificial Sequence
  Description of Artificial Sequence: Synthetic oligonucleotide
  Target: SCNA; (+) strand; PAM type: YTN; PAM sequence: TTC
cagacagttaccttgtacct

SEQ ID NO: 83205 - DNA, 20 bp, Artificial Sequence
  Description of Artificial Sequence: Synthetic oligonucleotide
  Target: SCNA; (+) strand; PAM type: YTN; PAM sequence: TTA
ccttgtaccttcatgtgcat

SEQ ID NO: 83206 - DNA, 20 bp, Artificial Sequence
  Description of Artificial Sequence: Synthetic oligonucleotide
  Target: SCNA; (+) strand; PAM type: YTN; PAM sequence: CTT
gtaccttcatgtgcatattc

SEQ ID NO: 83207 - DNA, 20 bp, Artificial Sequence
  Description of Artificial Sequence: Synthetic oligonucleotide
  Target: SCNA; (+) strand; PAM type: YTN; PAM sequence: TTG
taccttcatgtgcatattct

SEQ ID NO: 83208 - DNA, 20 bp, Artificial Sequence
  Description of Artificial Sequence: Synthetic oligonucleotide
  Target: SCNA; (+) strand; PAM type: YTN; PAM sequence: CTT
catgtgcatattctagaatg

SEQ ID NO: 83209 - DNA, 20 bp, Artificial Sequence
  Description of Artificial Sequence: Synthetic oligonucleotide
  Target: SCNA; (+) strand; PAM type: YTN; PAM sequence: TTC
atgtgcatattctagaatgt

SEQ ID NO: 83210 - DNA, 20 bp, Artificial Sequence
  Description of Artificial Sequence: Synthetic oligonucleotide
  Target: SCNA; (+) strand; PAM type: YTN; PAM sequence: TTC
tagaatgtcataaagatcta

SEQ ID NO: 83211 - DNA, 20 bp, Artificial Sequence
  Description of Artificial Sequence: Synthetic oligonucleotide
  Target: SCNA; (+) strand; PAM type: YTN; PAM sequence: CTA
gaatgtcataaagatctaat

SEQ ID NO: 83212 - DNA, 20 bp, Artificial Sequence
  Description of Artificial Sequence: Synthetic oligonucleotide
  Target: SCNA; (+) strand; PAM type: YTN; PAM sequence: CTA
atcacgtagtataaactttg

SEQ ID NO: 83213 - DNA, 20 bp, Artificial Sequence
  Description of Artificial Sequence: Synthetic oligonucleotide
  Target: SCNA; (+) strand; PAM type: YTN; PAM sequence: CTT
tgttttatatttgtctgact

SEQ ID NO: 83214 - DNA, 20 bp, Artificial Sequence
  Description of Artificial Sequence: Synthetic oligonucleotide
  Target: SCNA; (+) strand; PAM type: YTN; PAM sequence: TTT
gttttatatttgtctgactt

SEQ ID NO: 83215 - DNA, 20 bp, Artificial Sequence
  Description of Artificial Sequence: Synthetic oligonucleotide
  Target: SCNA; (+) strand; PAM type: YTN; PAM sequence: TTG
ttttatatttgtctgacttc

SEQ ID NO: 83216 - DNA, 20 bp, Artificial Sequence
  Description of Artificial Sequence: Synthetic oligonucleotide
  Target: SCNA; (+) strand; PAM type: YTN; PAM sequence: TTT
tatatttgtctgacttcttt

SEQ ID NO: 83217 - DNA, 20 bp, Artificial Sequence
  Description of Artificial Sequence: Synthetic oligonucleotide
  Target: SCNA; (+) strand; PAM type: YTN; PAM sequence: TTT
atatttgtctgacttctttt

SEQ ID NO: 83218 - DNA, 20 bp, Artificial Sequence
  Description of Artificial Sequence: Synthetic oligonucleotide
  Target: SCNA; (+) strand; PAM type: YTN; PAM sequence: TTA
tatttgtctgacttctttta

SEQ ID NO: 83219 - DNA, 20 bp, Artificial Sequence
  Description of Artificial Sequence: Synthetic oligonucleotide
  Target: SCNA; (+) strand; PAM type: YTN; PAM sequence: TTT
gtctgacttcttttactcag

SEQ ID NO: 83220 - DNA, 20 bp, Artificial Sequence
  Description of Artificial Sequence: Synthetic oligonucleotide
  Target: SCNA; (+) strand; PAM type: YTN; PAM sequence: TTG
tctgacttcttttactcagt

SEQ ID NO: 83221 - DNA, 20 bp, Artificial Sequence
  Description of Artificial Sequence: Synthetic oligonucleotide
  Target: SCNA; (+) strand; PAM type: YTN; PAM sequence: CTG
acttcttttactcagtataa

SEQ ID NO: 83222 - DNA, 20 bp, Artificial Sequence
  Description of Artificial Sequence: Synthetic oligonucleotide
  Target: SCNA; (+) strand; PAM type: YTN; PAM sequence: CTT
cttttactcagtataatatt

SEQ ID NO: 83223 - DNA, 20 bp, Artificial Sequence
  Description of Artificial Sequence: Synthetic oligonucleotide
  Target: SCNA; (+) strand; PAM type: YTN; PAM sequence: TTC
ttttactcagtataatattt

SEQ ID NO: 83224 - DNA, 20 bp, Artificial Sequence
  Description of Artificial Sequence: Synthetic oligonucleotide
  Target: SCNA; (+) strand; PAM type: YTN; PAM sequence: CTT
ttactcagtataatatttgt

SEQ ID NO: 83225 - DNA, 20 bp, Artificial Sequence
  Description of Artificial Sequence: Synthetic oligonucleotide
  Target: SCNA; (+) strand; PAM type: YTN; PAM sequence: TTT
tactcagtataatatttgtg

SEQ ID NO: 83226 - DNA, 20 bp, Artificial Sequence
  Description of Artificial Sequence: Synthetic oligonucleotide
  Target: SCNA; (+) strand; PAM type: YTN; PAM sequence: TTT
actcagtataatatttgtga

SEQ ID NO: 83227 - DNA, 20 bp, Artificial Sequence
  Description of Artificial Sequence: Synthetic oligonucleotide
  Target: SCNA; (+) strand; PAM type: YTN; PAM sequence: TTA
ctcagtataatatttgtgag

SEQ ID NO: 83228 - DNA, 20 bp, Artificial Sequence
  Description of Artificial Sequence: Synthetic oligonucleotide
  Target: SCNA; (+) strand; PAM type: YTN; PAM sequence: CTC
agtataatatttgtgaggtt

SEQ ID NO: 83229 - DNA, 20 bp, Artificial Sequence
  Description of Artificial Sequence: Synthetic oligonucleotide
  Target: SCNA; (+) strand; PAM type: YTN; PAM sequence: TTT
gtgaggttcgttcatgtcgt

SEQ ID NO: 83230 - DNA, 20 bp, Artificial Sequence
  Description of Artificial Sequence: Synthetic oligonucleotide
  Target: SCNA; (+) strand; PAM type: YTN; PAM sequence: TTG
tgaggttcgttcatgtcgtt

SEQ ID NO: 83231 - DNA, 20 bp, Artificial Sequence
  Description of Artificial Sequence: Synthetic oligonucleotide
  Target: SCNA; (+) strand; PAM type: YTN; PAM sequence: TTC
gttcatgtcgttgcatgaat

SEQ ID NO: 83232 - DNA, 20 bp, Artificial Sequence
  Description of Artificial Sequence: Synthetic oligonucleotide
  Target: SCNA; (+) strand; PAM type: YTN; PAM sequence: TTC
atgtcgttgcatgaatgggt

SEQ ID NO: 83233 - DNA, 20 bp, Artificial Sequence
  Description of Artificial Sequence: Synthetic oligonucleotide
  Target: SCNA; (+) strand; PAM type: YTN; PAM sequence: TTG
catgaatgggtgttttgttt

SEQ ID NO: 83234 - DNA, 20 bp, Artificial Sequence
  Description of Artificial Sequence: Synthetic oligonucleotide
  Target: SCNA; (+) strand; PAM type: YTN; PAM sequence: TTT
tgttttttattgctttttgt

SEQ ID NO: 83235 - DNA, 20 bp, Artificial Sequence
  Description of Artificial Sequence: Synthetic oligonucleotide
  Target: SCNA; (+) strand; PAM type: YTN; PAM sequence: TTT
gttttttattgctttttgtt

SEQ ID NO: 83236 - DNA, 20 bp, Artificial Sequence
  Description of Artificial Sequence: Synthetic oligonucleotide
  Target: SCNA; (+) strand; PAM type: YTN; PAM sequence: TTG
ttttttattgctttttgttg

SEQ ID NO: 83237 - DNA, 20 bp, Artificial Sequence
  Description of Artificial Sequence: Synthetic oligonucleotide
  Target: SCNA; (+) strand; PAM type: YTN; PAM sequence: TTT
tttattgctttttgttgttt

SEQ ID NO: 83238 - DNA, 20 bp, Artificial Sequence
  Description of Artificial Sequence: Synthetic oligonucleotide
  Target: SCNA; (+) strand; PAM type: YTN; PAM sequence: TTT
ttattgctttttgttgtttc

SEQ ID NO: 83239 - DNA, 20 bp, Artificial Sequence
  Description of Artificial Sequence: Synthetic oligonucleotide
  Target: SCNA; (+) strand; PAM type: YTN; PAM sequence: TTT
tattgctttttgttgtttct

SEQ ID NO: 83240 - DNA, 20 bp, Artificial Sequence
  Description of Artificial Sequence: Synthetic oligonucleotide
  Target: SCNA; (+) strand; PAM type: YTN; PAM sequence: TTT
attgctttttgttgtttctt

SEQ ID NO: 83241 - DNA, 20 bp, Artificial Sequence
  Description of Artificial Sequence: Synthetic oligonucleotide
  Target: SCNA; (+) strand; PAM type: YTN; PAM sequence: TTA
ttgctttttgttgtttcttt

SEQ ID NO: 83242 - DNA, 20 bp, Artificial Sequence
  Description of Artificial Sequence: Synthetic oligonucleotide
  Target: SCNA; (+) strand; PAM type: YTN; PAM sequence: TTG
ctttttgttgtttcttttta

SEQ ID NO: 83243 - DNA, 20 bp, Artificial Sequence
  Description of Artificial Sequence: Synthetic oligonucleotide
  Target: SCNA; (+) strand; PAM type: YTN; PAM sequence: CTT
tttgttgtttctttttacta

SEQ ID NO: 83244 - DNA, 20 bp, Artificial Sequence
  Description of Artificial Sequence: Synthetic oligonucleotide
  Target: SCNA; (+) strand; PAM type: YTN; PAM sequence: TTT
ttgttgtttctttttactac

SEQ ID NO: 83245 - DNA, 20 bp, Artificial Sequence
  Description of Artificial Sequence: Synthetic oligonucleotide
  Target: SCNA; (+) strand; PAM type: YTN; PAM sequence: TTT
tgttgtttctttttactact

SEQ ID NO: 83246 - DNA, 20 bp, Artificial Sequence
  Description of Artificial Sequence: Synthetic oligonucleotide
  Target: SCNA; (+) strand; PAM type: YTN; PAM sequence: TTT
gttgtttctttttactactg

SEQ ID NO: 83247 - DNA, 20 bp, Artificial Sequence
  Description of Artificial Sequence: Synthetic oligonucleotide
  Target: SCNA; (+) strand; PAM type: YTN; PAM sequence: TTG
ttgtttctttttactactgt

SEQ ID NO: 83248 - DNA, 20 bp, Artificial Sequence
  Description of Artificial Sequence: Synthetic oligonucleotide
  Target: SCNA; (+) strand; PAM type: YTN; PAM sequence: TTG
tttctttttactactgttaa

SEQ ID NO: 83249 - DNA, 20 bp, Artificial Sequence
  Description of Artificial Sequence: Synthetic oligonucleotide
  Target: SCNA; (+) strand; PAM type: YTN; PAM sequence: TTT
ctttttactactgttaatag

SEQ ID NO: 83250 - DNA, 20 bp, Artificial Sequence
  Description of Artificial Sequence: Synthetic oligonucleotide
  Target: SCNA; (+) strand; PAM type: YTN; PAM sequence: TTC
tttttactactgttaatagt

SEQ ID NO: 83251 - DNA, 20 bp, Artificial Sequence
  Description of Artificial Sequence: Synthetic oligonucleotide
  Target: SCNA; (+) strand; PAM type: YTN; PAM sequence: CTT
tttactactgttaatagtat

SEQ ID NO: 83252 - DNA, 20 bp, Artificial Sequence
  Description of Artificial Sequence: Synthetic oligonucleotide
  Target: SCNA; (+) strand; PAM type: YTN; PAM sequence: TTT
ttactactgttaatagtata

SEQ ID NO: 83253 - DNA, 20 bp, Artificial Sequence
  Description of Artificial Sequence: Synthetic oligonucleotide
  Target: SCNA; (+) strand; PAM type: YTN; PAM sequence: TTT
tactactgttaatagtataa

SEQ ID NO: 83254 - DNA, 20 bp, Artificial Sequence
  Description of Artificial Sequence: Synthetic oligonucleotide
  Target: SCNA; (+) strand; PAM type: YTN; PAM sequence: TTT
actactgttaatagtataag

SEQ ID NO: 83255 - DNA, 20 bp, Artificial Sequence
  Description of Artificial Sequence: Synthetic oligonucleotide
  Target: SCNA; (+) strand; PAM type: YTN; PAM sequence: TTA
ctactgttaatagtataagt

SEQ ID NO: 83256 - DNA, 20 bp, Artificial Sequence
  Description of Artificial Sequence: Synthetic oligonucleotide
  Target: SCNA; (+) strand; PAM type: YTN; PAM sequence: CTA
ctgttaatagtataagtttt

SEQ ID NO: 83257 - DNA, 20 bp, Artificial Sequence
  Description of Artificial Sequence: Synthetic oligonucleotide
  Target: SCNA; (+) strand; PAM type: YTN; PAM sequence: CTG
ttaatagtataagttttcca

SEQ ID NO: 83258 - DNA, 20 bp, Artificial Sequence
  Description of Artificial Sequence: Synthetic oligonucleotide
  Target: SCNA; (+) strand; PAM type: YTN; PAM sequence: TTA
atagtataagttttccattg

SEQ ID NO: 83259 - DNA, 20 bp, Artificial Sequence
  Description of Artificial Sequence: Synthetic oligonucleotide
  Target: SCNA; (+) strand; PAM type: YTN; PAM sequence: TTT
tccattgtgcctctttacaa

SEQ ID NO: 83260 - DNA, 20 bp, Artificial Sequence
  Description of Artificial Sequence: Synthetic oligonucleotide
  Target: SCNA; (+) strand; PAM type: YTN; PAM sequence: TTT
ccattgtgcctctttacaac

SEQ ID NO: 83261 - DNA, 20 bp, Artificial Sequence
  Description of Artificial Sequence: Synthetic oligonucleotide
  Target: SCNA; (+) strand; PAM type: YTN; PAM sequence: TTC
cattgtgcctctttacaact

SEQ ID NO: 83262 - DNA, 20 bp, Artificial Sequence
  Description of Artificial Sequence: Synthetic oligonucleotide
  Target: SCNA; (+) strand; PAM type: YTN; PAM sequence: TTG
tgcctctttacaactagtat

SEQ ID NO: 83263 - DNA, 20 bp, Artificial Sequence
  Description of Artificial Sequence: Synthetic oligonucleotide
  Target: SCNA; (+) strand; PAM type: YTN; PAM sequence: CTC
tttacaactagtatctcaat

SEQ ID NO: 83264 - DNA, 20 bp, Artificial Sequence
  Description of Artificial Sequence: Synthetic oligonucleotide
  Target: SCNA; (+) strand; PAM type: YTN; PAM sequence: CTT
tacaactagtatctcaatag

SEQ ID NO: 83265 - DNA, 20 bp, Artificial Sequence
  Description of Artificial Sequence: Synthetic oligonucleotide
  Target: SCNA; (+) strand; PAM type: YTN; PAM sequence: TTT
acaactagtatctcaataga

SEQ ID NO: 83266 - DNA, 20 bp, Artificial Sequence
  Description of Artificial Sequence: Synthetic oligonucleotide
  Target: SCNA; (+) strand; PAM type: YTN; PAM sequence: TTA
caactagtatctcaatagag

SEQ ID NO: 83267 - DNA, 20 bp, Artificial Sequence
  Description of Artificial Sequence: Synthetic oligonucleotide
  Target: SCNA; (+) strand; PAM type: YTN; PAM sequence: CTA
gtatctcaatagagtattac

SEQ ID NO: 83268 - DNA, 20 bp, Artificial Sequence
  Description of Artificial Sequence: Synthetic oligonucleotide
  Target: SCNA; (+) strand; PAM type: YTN; PAM sequence: CTC
aatagagtattacaacaatt

SEQ ID NO: 83269 - DNA, 20 bp, Artificial Sequence
  Description of Artificial Sequence: Synthetic oligonucleotide
  Target: SCNA; (+) strand; PAM type: YTN; PAM sequence: TTA
caacaattatttaatatatt

SEQ ID NO: 83270 - DNA, 20 bp, Artificial Sequence
  Description of Artificial Sequence: Synthetic oligonucleotide
  Target: SCNA; (+) strand; PAM type: YTN; PAM sequence: TTA
tttaatatattatttcacat

SEQ ID NO: 83271 - DNA, 20 bp, Artificial Sequence
  Description of Artificial Sequence: Synthetic oligonucleotide
  Target: SCNA; (+) strand; PAM type: YTN; PAM sequence: TTT
aatatattatttcacatgac

SEQ ID NO: 83272 - DNA, 20 bp, Artificial Sequence
  Description of Artificial Sequence: Synthetic oligonucleotide
  Target: SCNA; (+) strand; PAM type: YTN; PAM sequence: TTA
atatattatttcacatgaca

SEQ ID NO: 83273 - DNA, 20 bp, Artificial Sequence
  Description of Artificial Sequence: Synthetic oligonucleotide
  Target: SCNA; (+) strand; PAM type: YTN; PAM sequence: TTA
tttcacatgacatatttata

SEQ ID NO: 83274 - DNA, 20 bp, Artificial Sequence
  Description of Artificial Sequence: Synthetic oligonucleotide
  Target: SCNA; (+) strand; PAM type: YTN; PAM sequence: TTT
cacatgacatatttatagta

SEQ ID NO: 83275 - DNA, 20 bp, Artificial Sequence
  Description of Artificial Sequence: Synthetic oligonucleotide
  Target: SCNA; (+) strand; PAM type: YTN; PAM sequence: TTC
acatgacatatttatagtat

SEQ ID NO: 83276 - DNA, 20 bp, Artificial Sequence
  Description of Artificial Sequence: Synthetic oligonucleotide
  Target: SCNA; (+) strand; PAM type: YTN; PAM sequence: TTT
atagtataaccatgacctcc

SEQ ID NO: 83277 - DNA, 20 bp, Artificial Sequence
  Description of Artificial Sequence: Synthetic oligonucleotide
  Target: SCNA; (+) strand; PAM type: YTN; PAM sequence: TTA
tagtataaccatgacctcct

SEQ ID NO: 83278 - DNA, 20 bp, Artificial Sequence
  Description of Artificial Sequence: Synthetic oligonucleotide
  Target: SCNA; (+) strand; PAM type: YTN; PAM sequence: CTC
cttgagacctagtgctttaa

SEQ ID NO: 83279 - DNA, 20 bp, Artificial Sequence
  Description of Artificial Sequence: Synthetic oligonucleotide
  Target: SCNA; (+) strand; PAM type: YTN; PAM sequence: CTT
gagacctagtgctttaagtc

SEQ ID NO: 83280 - DNA, 20 bp, Artificial Sequence
  Description of Artificial Sequence: Synthetic oligonucleotide
  Target: SCNA; (+) strand; PAM type: YTN; PAM sequence: TTG
agacctagtgctttaagtca

SEQ ID NO: 83281 - DNA, 20 bp, Artificial Sequence
  Description of Artificial Sequence: Synthetic oligonucleotide
  Target: SCNA; (+) strand; PAM type: YTN; PAM sequence: CTA
gtgctttaagtcaaagaggt

SEQ ID NO: 83282 - DNA, 20 bp, Artificial Sequence
  Description of Artificial Sequence: Synthetic oligonucleotide
  Target: SCNA; (+) strand; PAM type: YTN; PAM sequence: CTT
taagtcaaagaggtaaataa

SEQ ID NO: 83283 - DNA, 20 bp, Artificial Sequence
  Description of Artificial Sequence: Synthetic oligonucleotide
  Target: SCNA; (+) strand; PAM type: YTN; PAM sequence: TTT
aagtcaaagaggtaaataaa

SEQ ID NO: 83284 - DNA, 20 bp, Artificial Sequence
  Description of Artificial Sequence: Synthetic oligonucleotide
  Target: SCNA; (+) strand; PAM type: YTN; PAM sequence: TTA
agtcaaagaggtaaataaaa

SEQ ID NO: 83285 - DNA, 20 bp, Artificial Sequence
  Description of Artificial Sequence: Synthetic oligonucleotide
  Target: SCNA; (+) strand; PAM type: YTN; PAM sequence: TTT
taggtctcattacaacagac

SEQ ID NO: 83286 - DNA, 20 bp, Artificial Sequence
  Description of Artificial Sequence: Synthetic oligonucleotide
  Target: SCNA; (+) strand; PAM type: YTN; PAM sequence: TTT
aggtctcattacaacagacc

SEQ ID NO: 83287 - DNA, 20 bp, Artificial Sequence
  Description of Artificial Sequence: Synthetic oligonucleotide
  Target: SCNA; (+) strand; PAM type: YTN; PAM sequence: TTA
ggtctcattacaacagacca

SEQ ID NO: 83288 - DNA, 20 bp, Artificial Sequence
  Description of Artificial Sequence: Synthetic oligonucleotide
  Target: SCNA; (+) strand; PAM type: YTN; PAM sequence: CTC
attacaacagaccaatgtga

SEQ ID NO: 83289 - DNA, 20 bp, Artificial Sequence
  Description of Artificial Sequence: Synthetic oligonucleotide
  Target: SCNA; (+) strand; PAM type: YTN; PAM sequence: TTA
caacagaccaatgtgagaga

SEQ ID NO: 83290 - DNA, 20 bp, Artificial Sequence
  Description of Artificial Sequence: Synthetic oligonucleotide
  Target: SCNA; (+) strand; PAM type: YTN; PAM sequence: TTA
tttctggacagttgcacttc

SEQ ID NO: 83291 - DNA, 20 bp, Artificial Sequence
  Description of Artificial Sequence: Synthetic oligonucleotide
  Target: SCNA; (+) strand; PAM type: YTN; PAM sequence: TTT
ctggacagttgcacttctta

SEQ ID NO: 83292 - DNA, 20 bp, Artificial Sequence
  Description of Artificial Sequence: Synthetic oligonucleotide
  Target: SCNA; (+) strand; PAM type: YTN; PAM sequence: TTC
tggacagttgcacttcttat

SEQ ID NO: 83293 - DNA, 20 bp, Artificial Sequence
  Description of Artificial Sequence: Synthetic oligonucleotide
  Target: SCNA; (+) strand; PAM type: YTN; PAM sequence: CTG
gacagttgcacttcttataa

SEQ ID NO: 83294 - DNA, 20 bp, Artificial Sequence
  Description of Artificial Sequence: Synthetic oligonucleotide
  Target: SCNA; (+) strand; PAM type: YTN; PAM sequence: TTG
cacttcttataaacgtttaa

SEQ ID NO: 83295 - DNA, 20 bp, Artificial Sequence
  Description of Artificial Sequence: Synthetic oligonucleotide
  Target: SCNA; (+) strand; PAM type: YTN; PAM sequence: CTT
cttataaacgtttaacatga

SEQ ID NO: 83296 - DNA, 20 bp, Artificial Sequence
  Description of Artificial Sequence: Synthetic oligonucleotide
  Target: SCNA; (+) strand; PAM type: YTN; PAM sequence: TTC
ttataaacgtttaacatgat

SEQ ID NO: 83297 - DNA, 20 bp, Artificial Sequence
  Description of Artificial Sequence: Synthetic oligonucleotide
  Target: SCNA; (+) strand; PAM type: YTN; PAM sequence: CTT
ataaacgtttaacatgattc

SEQ ID NO: 83298 - DNA, 20 bp, Artificial Sequence
  Description of Artificial Sequence: Synthetic oligonucleotide
  Target: SCNA; (+) strand; PAM type: YTN; PAM sequence: TTA
taaacgtttaacatgattcc

SEQ ID NO: 83299 - DNA, 20 bp, Artificial Sequence
  Description of Artificial Sequence: Synthetic oligonucleotide
  Target: SCNA; (+) strand; PAM type: YTN; PAM sequence: TTT
aacatgattccaaactttta

SEQ ID NO: 83300 - DNA, 20 bp, Artificial Sequence
  Description of Artificial Sequence: Synthetic oligonucleotide
  Target: SCNA; (+) strand; PAM type: YTN; PAM sequence: TTA
acatgattccaaacttttat

SEQ ID NO: 83301 - DNA, 20 bp, Artificial Sequence
  Description of Artificial Sequence: Synthetic oligonucleotide
  Target: SCNA; (+) strand; PAM type: YTN; PAM sequence: TTC
caaacttttatttggtaatt

SEQ ID NO: 83302 - DNA, 20 bp, Artificial Sequence
  Description of Artificial Sequence: Synthetic oligonucleotide
  Target: SCNA; (+) strand; PAM type: YTN; PAM sequence: CTT
ttatttggtaatttgttagt

SEQ ID NO: 83303 - DNA, 20 bp, Artificial Sequence
  Description of Artificial Sequence: Synthetic oligonucleotide
  Target: SCNA; (+) strand; PAM type: YTN; PAM sequence: TTT
tatttggtaatttgttagtc

SEQ ID NO: 83304 - DNA, 20 bp, Artificial Sequence
  Description of Artificial Sequence: Synthetic oligonucleotide
  Target: SCNA; (+) strand; PAM type: YTN; PAM sequence: TTT
atttggtaatttgttagtcc

SEQ ID NO: 83305 - DNA, 20 bp, Artificial Sequence
  Description of Artificial Sequence: Synthetic oligonucleotide
  Target: SCNA; (+) strand; PAM type: YTN; PAM sequence: TTA
tttggtaatttgttagtcct

SEQ ID NO: 83306 - DNA, 20 bp, Artificial Sequence
  Description of Artificial Sequence: Synthetic oligonucleotide
  Target: SCNA; (+) strand; PAM type: YTN; PAM sequence: TTT
ggtaatttgttagtcctttg

SEQ ID NO: 83307 - DNA, 20 bp, Artificial Sequence
  Description of Artificial Sequence: Synthetic oligonucleotide
  Target: SCNA; (+) strand; PAM type: YTN; PAM sequence: TTG
gtaatttgttagtcctttgg

SEQ ID NO: 83308 - DNA, 20 bp, Artificial Sequence
  Description of Artificial Sequence: Synthetic oligonucleotide
  Target: SCNA; (+) strand; PAM type: YTN; PAM sequence: TTT
gttagtcctttggcaaagga

SEQ ID NO: 83309 - DNA, 20 bp, Artificial Sequence
  Description of Artificial Sequence: Synthetic oligonucleotide
  Target: SCNA; (+) strand; PAM type: YTN; PAM sequence: TTG
ttagtcctttggcaaaggac

SEQ ID NO: 83310 - DNA, 20 bp, Artificial Sequence
  Description of Artificial Sequence: Synthetic oligonucleotide
  Target: SCNA; (+) strand; PAM type: YTN; PAM sequence: TTA
gtcctttggcaaaggactaa

SEQ ID NO: 83311 - DNA, 20 bp, Artificial Sequence
  Description of Artificial Sequence: Synthetic oligonucleotide
  Target: SCNA; (+) strand; PAM type: YTN; PAM sequence: CTT
tggcaaaggactaatgtact

SEQ ID NO: 83312 - DNA, 20 bp, Artificial Sequence
  Description of Artificial Sequence: Synthetic oligonucleotide
  Target: SCNA; (+) strand; PAM type: YTN; PAM sequence: TTT
ggcaaaggactaatgtacta

SEQ ID NO: 83313 - DNA, 20 bp, Artificial Sequence
  Description of Artificial Sequence: Synthetic oligonucleotide
  Target: SCNA; (+) strand; PAM type: YTN; PAM sequence: TTG
gcaaaggactaatgtactat

SEQ ID NO: 83314 - DNA, 20 bp, Artificial Sequence
  Description of Artificial Sequence: Synthetic oligonucleotide
  Target: SCNA; (+) strand; PAM type: YTN; PAM sequence: CTA
atgtactatgttatttagtc

SEQ ID NO: 83315 - DNA, 20 bp, Artificial Sequence
  Description of Artificial Sequence: Synthetic oligonucleotide
  Target: SCNA; (+) strand; PAM type: YTN; PAM sequence: CTA
tgttatttagtcataacaag

SEQ ID NO: 83316 - DNA, 20 bp, Artificial Sequence
  Description of Artificial Sequence: Synthetic oligonucleotide
  Target: SCNA; (+) strand; PAM type: YTN; PAM sequence: TTA
tttagtcataacaagcagat

SEQ ID NO: 83317 - DNA, 20 bp, Artificial Sequence
  Description of Artificial Sequence: Synthetic oligonucleotide
  Target: SCNA; (+) strand; PAM type: YTN; PAM sequence: TTT
agtcataacaagcagatcaa

SEQ ID NO: 83318 - DNA, 20 bp, Artificial Sequence
  Description of Artificial Sequence: Synthetic oligonucleotide
  Target: SCNA; (+) strand; PAM type: YTN; PAM sequence: TTA
gtcataacaagcagatcaat

SEQ ID NO: 83319 - DNA, 20 bp, Artificial Sequence
  Description of Artificial Sequence: Synthetic oligonucleotide
  Target: SCNA; (+) strand; PAM type: YTN; PAM sequence: TTA
cattttatgtaacttttata

SEQ ID NO: 83320 - DNA, 20 bp, Artificial Sequence
  Description of Artificial Sequence: Synthetic oligonucleotide
  Target: SCNA; (+) strand; PAM type: YTN; PAM sequence: TTT
tatgtaacttttatagacag

SEQ ID NO: 83321 - DNA, 20 bp, Artificial Sequence
  Description of Artificial Sequence: Synthetic oligonucleotide
  Target: SCNA; (+) strand; PAM type: YTN; PAM sequence: TTT
atgtaacttttatagacaga

SEQ ID NO: 83322 - DNA, 20 bp, Artificial Sequence
  Description of Artificial Sequence: Synthetic oligonucleotide
  Target: SCNA; (+) strand; PAM type: YTN; PAM sequence: TTA
tgtaacttttatagacagag

SEQ ID NO: 83323 - DNA, 20 bp, Artificial Sequence
  Description of Artificial Sequence: Synthetic oligonucleotide
  Target: SCNA; (+) strand; PAM type: YTN; PAM sequence: CTT
ttatagacagagaaactgag

SEQ ID NO: 83324 - DNA, 20 bp, Artificial Sequence
  Description of Artificial Sequence: Synthetic oligonucleotide
  Target: SCNA; (+) strand; PAM type: YTN; PAM sequence: TTT
tatagacagagaaactgagc

SEQ ID NO: 83325 - DNA, 20 bp, Artificial Sequence
  Description of Artificial Sequence: Synthetic oligonucleotide
  Target: SCNA; (+) strand; PAM type: YTN; PAM sequence: TTT
atagacagagaaactgagct

SEQ ID NO: 83326 - DNA, 20 bp, Artificial Sequence
  Description of Artificial Sequence: Synthetic oligonucleotide
  Target: SCNA; (+) strand; PAM type: YTN; PAM sequence: TTA
tagacagagaaactgagctc

SEQ ID NO: 83327 - DNA, 20 bp, Artificial Sequence
  Description of Artificial Sequence: Synthetic oligonucleotide
  Target: SCNA; (+) strand; PAM type: YTN; PAM sequence: CTG
agctccaagagttttggtga

SEQ ID NO: 83328 - DNA, 20 bp, Artificial Sequence
  Description of Artificial Sequence: Synthetic oligonucleotide
  Target: SCNA; (+) strand; PAM type: YTN; PAM sequence: CTC
caagagttttggtgatatgc

SEQ ID NO: 83329 - DNA, 20 bp, Artificial Sequence
  Description of Artificial Sequence: Synthetic oligonucleotide
  Target: SCNA; (+) strand; PAM type: YTN; PAM sequence: TTT
tggtgatatgctgagatcac

SEQ ID NO: 83330 - DNA, 20 bp, Artificial Sequence
  Description of Artificial Sequence: Synthetic oligonucleotide
  Target: SCNA; (+) strand; PAM type: YTN; PAM sequence: TTT
ggtgatatgctgagatcacc

SEQ ID NO: 83331 - DNA, 20 bp, Artificial Sequence
  Description of Artificial Sequence: Synthetic oligonucleotide
  Target: SCNA; (+) strand; PAM type: YTN; PAM sequence: TTG
gtgatatgctgagatcacct

SEQ ID NO: 83332 - DNA, 20 bp, Artificial Sequence
  Description of Artificial Sequence: Synthetic oligonucleotide
  Target: SCNA; (+) strand; PAM type: YTN; PAM sequence: CTG
agatcacctagctattttaa

SEQ ID NO: 83333 - DNA, 20 bp, Artificial Sequence
  Description of Artificial Sequence: Synthetic oligonucleotide
  Target: SCNA; (+) strand; PAM type: YTN; PAM sequence: CTA
gctattttaagtggcagagc

SEQ ID NO: 83334 - DNA, 20 bp, Artificial Sequence
  Description of Artificial Sequence: Synthetic oligonucleotide
  Target: SCNA; (+) strand; PAM type: YTN; PAM sequence: CTA
ttttaagtggcagagctgag

SEQ ID NO: 83335 - DNA, 20 bp, Artificial Sequence
  Description of Artificial Sequence: Synthetic oligonucleotide
  Target: SCNA; (+) strand; PAM type: YTN; PAM sequence: TTT
taagtggcagagctgagaca

SEQ ID NO: 83336 - DNA, 20 bp, Artificial Sequence
  Description of Artificial Sequence: Synthetic oligonucleotide
  Target: SCNA; (+) strand; PAM type: YTN; PAM sequence: TTT
aagtggcagagctgagacaa

SEQ ID NO: 83337 - DNA, 20 bp, Artificial Sequence
  Description of Artificial Sequence: Synthetic oligonucleotide
  Target: SCNA; (+) strand; PAM type: YTN; PAM sequence: TTA
agtggcagagctgagacaat

SEQ ID NO: 83338 - DNA, 20 bp, Artificial Sequence
  Description of Artificial Sequence: Synthetic oligonucleotide
  Target: SCNA; (+) strand; PAM type: YTN; PAM sequence: CTG
agacaatttagcagaaactg

SEQ ID NO: 83339 - DNA, 20 bp, Artificial Sequence
  Description of Artificial Sequence: Synthetic oligonucleotide
  Target: SCNA; (+) strand; PAM type: YTN; PAM sequence: TTT
agcagaaactgttacagaag

SEQ ID NO: 83340 - DNA, 20 bp, Artificial Sequence
  Description of Artificial Sequence: Synthetic oligonucleotide
  Target: SCNA; (+) strand; PAM type: YTN; PAM sequence: TTA
gcagaaactgttacagaagg

SEQ ID NO: 83341 - DNA, 20 bp, Artificial Sequence
  Description of Artificial Sequence: Synthetic oligonucleotide
  Target: SCNA; (+) strand; PAM type: YTN; PAM sequence: CTG
ttacagaaggcacaattgtc

SEQ ID NO: 83342 - DNA, 20 bp, Artificial Sequence
  Description of Artificial Sequence: Synthetic oligonucleotide
  Target: SCNA; (+) strand; PAM type: YTN; PAM sequence: TTA
cagaaggcacaattgtctcc

SEQ ID NO: 83343 - DNA, 20 bp, Artificial Sequence
  Description of Artificial Sequence: Synthetic oligonucleotide
  Target: SCNA; (+) strand; PAM type: YTN; PAM sequence: TTG
tctcctgaattagcagtttg

SEQ ID NO: 83344 - DNA, 20 bp, Artificial Sequence
  Description of Artificial Sequence: Synthetic oligonucleotide
  Target: SCNA; (+) strand; PAM type: YTN; PAM sequence: CTC
ctgaattagcagtttgtgtc

SEQ ID NO: 83345 - DNA, 20 bp, Artificial Sequence
  Description of Artificial Sequence: Synthetic oligonucleotide
  Target: SCNA; (+) strand; PAM type: YTN; PAM sequence: CTG
aattagcagtttgtgtctga

SEQ ID NO: 83346 - DNA, 20 bp, Artificial Sequence
  Description of Artificial Sequence: Synthetic oligonucleotide
  Target: SCNA; (+) strand; PAM type: YTN; PAM sequence: TTA
gcagtttgtgtctgaagcct

SEQ ID NO: 83347 - DNA, 20 bp, Artificial Sequence
  Description of Artificial Sequence: Synthetic oligonucleotide
  Target: SCNA; (+) strand; PAM type: YTN; PAM sequence: TTT
gtgtctgaagcctcacagat

SEQ ID NO: 83348 - DNA, 20 bp, Artificial Sequence
  Description of Artificial Sequence: Synthetic oligonucleotide
  Target: SCNA; (+) strand; PAM type: YTN; PAM sequence: TTG
tgtctgaagcctcacagatt

SEQ ID NO: 83349 - DNA, 20 bp, Artificial Sequence
  Description of Artificial Sequence: Synthetic oligonucleotide
  Target: SCNA; (+) strand; PAM type: YTN; PAM sequence: CTG
aagcctcacagattgggtgt

SEQ ID NO: 83350 - DNA, 20 bp, Artificial Sequence
  Description of Artificial Sequence: Synthetic oligonucleotide
  Target: SCNA; (+) strand; PAM type: YTN; PAM sequence: CTC
acagattgggtgtggtaaag

SEQ ID NO: 83351 - DNA, 20 bp, Artificial Sequence
  Description of Artificial Sequence: Synthetic oligonucleotide
  Target: SCNA; (+) strand; PAM type: YTN; PAM sequence: TTG
ggtgtggtaaagagtgagaa

SEQ ID NO: 83352 - DNA, 20 bp, Artificial Sequence
  Description of Artificial Sequence: Synthetic oligonucleotide
  Target: SCNA; (+) strand; PAM type: YTN; PAM sequence: CTG
tgttagaaatagccttcaaa

SEQ ID NO: 83353 - DNA, 20 bp, Artificial Sequence
  Description of Artificial Sequence: Synthetic oligonucleotide
  Target: SCNA; (+) strand; PAM type: YTN; PAM sequence: TTA
gaaatagccttcaaatttgg

SEQ ID NO: 83354 - DNA, 20 bp, Artificial Sequence
  Description of Artificial Sequence: Synthetic oligonucleotide
  Target: SCNA; (+) strand; PAM type: YTN; PAM sequence: CTT
caaatttggatgtgacaatg

SEQ ID NO: 83355 - DNA, 20 bp, Artificial Sequence
  Description of Artificial Sequence: Synthetic oligonucleotide
  Target: SCNA; (+) strand; PAM type: YTN; PAM sequence: TTC
aaatttggatgtgacaatgg

SEQ ID NO: 83356 - DNA, 20 bp, Artificial Sequence
  Description of Artificial Sequence: Synthetic oligonucleotide
  Target: SCNA; (+) strand; PAM type: YTN; PAM sequence: TTT
ggatgtgacaatggaaatca

SEQ ID NO: 83357 - DNA, 20 bp, Artificial Sequence
  Description of Artificial Sequence: Synthetic oligonucleotide
  Target: SCNA; (+) strand; PAM type: YTN; PAM sequence: TTG
gatgtgacaatggaaatcaa

SEQ ID NO: 83358 - DNA, 20 bp, Artificial Sequence
  Description of Artificial Sequence: Synthetic oligonucleotide
  Target: SCNA; (+) strand; PAM type: YTN; PAM sequence: CTT
atgttattatgaaacagttc

SEQ ID NO: 83359 - DNA, 20 bp, Artificial Sequence
  Description of Artificial Sequence: Synthetic oligonucleotide
  Target: SCNA; (+) strand; PAM type: YTN; PAM sequence: TTA
tgttattatgaaacagttca

SEQ ID NO: 83360 - DNA, 20 bp, Artificial Sequence
  Description of Artificial Sequence: Synthetic oligonucleotide
  Target: SCNA; (+) strand; PAM type: YTN; PAM sequence: TTA
ttatgaaacagttcattcat

SEQ ID NO: 83361 - DNA, 20 bp, Artificial Sequence
  Description of Artificial Sequence: Synthetic oligonucleotide
  Target: SCNA; (+) strand; PAM type: YTN; PAM sequence: TTA
tgaaacagttcattcatatt

SEQ ID NO: 83362 - DNA, 20 bp, Artificial Sequence
  Description of Artificial Sequence: Synthetic oligonucleotide
  Target: SCNA; (+) strand; PAM type: YTN; PAM sequence: TTC
attcatatttaaagttttgc

SEQ ID NO: 83363 - DNA, 20 bp, Artificial Sequence
  Description of Artificial Sequence: Synthetic oligonucleotide
  Target: SCNA; (+) strand; PAM type: YTN; PAM sequence: TTC
atatttaaagttttgccttt

SEQ ID NO: 83364 - DNA, 20 bp, Artificial Sequence
  Description of Artificial Sequence: Synthetic oligonucleotide
  Target: SCNA; (+) strand; PAM type: YTN; PAM sequence: TTT
aaagttttgccttttctata

SEQ ID NO: 83365 - DNA, 20 bp, Artificial Sequence
  Description of Artificial Sequence: Synthetic oligonucleotide
  Target: SCNA; (+) strand; PAM type: YTN; PAM sequence: TTA
aagttttgccttttctatat

SEQ ID NO: 83366 - DNA, 20 bp, Artificial Sequence
  Description of Artificial Sequence: Synthetic oligonucleotide
  Target: SCNA; (+) strand; PAM type: YTN; PAM sequence: TTT
tgccttttctatattggtat

SEQ ID NO: 83367 - DNA, 20 bp, Artificial Sequence
  Description of Artificial Sequence: Synthetic oligonucleotide
  Target: SCNA; (+) strand; PAM type: YTN; PAM sequence: TTT
gccttttctatattggtatt

SEQ ID NO: 83368 - DNA, 20 bp, Artificial Sequence
  Description of Artificial Sequence: Synthetic oligonucleotide
  Target: SCNA; (+) strand; PAM type: YTN; PAM sequence: TTG
ccttttctatattggtattc

SEQ ID NO: 83369 - DNA, 20 bp, Artificial Sequence
  Description of Artificial Sequence: Synthetic oligonucleotide
  Target: SCNA; (+) strand; PAM type: YTN; PAM sequence: CTT
ttctatattggtattcctca

SEQ ID NO: 83370 - DNA, 20 bp, Artificial Sequence
  Description of Artificial Sequence: Synthetic oligonucleotide
  Target: SCNA; (+) strand; PAM type: YTN; PAM sequence: TTT
tctatattggtattcctcaa

SEQ ID NO: 83371 - DNA, 20 bp, Artificial Sequence
  Description of Artificial Sequence: Synthetic oligonucleotide
  Target: SCNA; (+) strand; PAM type: YTN; PAM sequence: TTT
ctatattggtattcctcaat

SEQ ID NO: 83372 - DNA, 20 bp, Artificial Sequence
  Description of Artificial Sequence: Synthetic oligonucleotide
  Target: SCNA; (+) strand; PAM type: YTN; PAM sequence: TTC
tatattggtattcctcaata

SEQ ID NO: 83373 - DNA, 20 bp, Artificial Sequence
  Description of Artificial Sequence: Synthetic oligonucleotide
  Target: SCNA; (+) strand; PAM type: YTN; PAM sequence: CTA
tattggtattcctcaatagg

SEQ ID NO: 83374 - DNA, 20 bp, Artificial Sequence
  Description of Artificial Sequence: Synthetic oligonucleotide
  Target: SCNA; (+) strand; PAM type: YTN; PAM sequence: TTG
gtattcctcaatagggggag

SEQ ID NO: 83375 - DNA, 20 bp, Artificial Sequence
  Description of Artificial Sequence: Synthetic oligonucleotide
  Target: SCNA; (+) strand; PAM type: YTN; PAM sequence: TTC
ctcaatagggggagatgatt

SEQ ID NO: 83376 - DNA, 20 bp, Artificial Sequence
  Description of Artificial Sequence: Synthetic oligonucleotide
  Target: SCNA; (+) strand; PAM type: YTN; PAM sequence: CTC
aatagggggagatgatttct

SEQ ID NO: 83377 - DNA, 20 bp, Artificial Sequence
  Description of Artificial Sequence: Synthetic oligonucleotide
  Target: SCNA; (+) strand; PAM type: YTN; PAM sequence: TTT
cttactacctacaaaaaaag

SEQ ID NO: 83378 - DNA, 20 bp, Artificial Sequence
  Description of Artificial Sequence: Synthetic oligonucleotide
  Target: SCNA; (+) strand; PAM type: YTN; PAM sequence: TTC
ttactacctacaaaaaaaga

SEQ ID NO: 83379 - DNA, 20 bp, Artificial Sequence
  Description of Artificial Sequence: Synthetic oligonucleotide
  Target: SCNA; (+) strand; PAM type: YTN; PAM sequence: CTT
actacctacaaaaaaagaaa

SEQ ID NO: 83380 - DNA, 20 bp, Artificial Sequence
  Description of Artificial Sequence: Synthetic oligonucleotide
  Target: SCNA; (+) strand; PAM type: YTN; PAM sequence: TTA
ctacctacaaaaaaagaaaa

SEQ ID NO: 83381 - DNA, 20 bp, Artificial Sequence
  Description of Artificial Sequence: Synthetic oligonucleotide
  Target: SCNA; (+) strand; PAM type: YTN; PAM sequence: CTA
cctacaaaaaaagaaaactg

SEQ ID NO: 83382 - DNA, 20 bp, Artificial Sequence
  Description of Artificial Sequence: Synthetic oligonucleotide
  Target: SCNA; (+) strand; PAM type: YTN; PAM sequence: CTA
caaaaaaagaaaactgtaaa

SEQ ID NO: 83383 - DNA, 20 bp, Artificial Sequence
  Description of Artificial Sequence: Synthetic oligonucleotide
  Target: SCNA; (+) strand; PAM type: YTN; PAM sequence: CTG
taaactaatttcgttgtcat

SEQ ID NO: 83384 - DNA, 20 bp, Artificial Sequence
  Description of Artificial Sequence: Synthetic oligonucleotide
  Target: SCNA; (+) strand; PAM type: YTN; PAM sequence: CTA
atttcgttgtcattttgaat

SEQ ID NO: 83385 - DNA, 20 bp, Artificial Sequence
  Description of Artificial Sequence: Synthetic oligonucleotide
  Target: SCNA; (+) strand; PAM type: YTN; PAM sequence: TTT
cgttgtcattttgaattaca

SEQ ID NO: 83386 - DNA, 20 bp, Artificial Sequence
  Description of Artificial Sequence: Synthetic oligonucleotide
  Target: SCNA; (+) strand; PAM type: YTN; PAM sequence: TTC
gttgtcattttgaattacaa

SEQ ID NO: 83387 - DNA, 20 bp, Artificial Sequence
  Description of Artificial Sequence: Synthetic oligonucleotide
  Target: SCNA; (+) strand; PAM type: YTN; PAM sequence: TTG
tcattttgaattacaactat

SEQ ID NO: 83388 - DNA, 20 bp, Artificial Sequence
  Description of Artificial Sequence: Synthetic oligonucleotide
  Target: SCNA; (+) strand; PAM type: YTN; PAM sequence: TTT
tgaattacaactatatgttt

SEQ ID NO: 83389 - DNA, 20 bp, Artificial Sequence
  Description of Artificial Sequence: Synthetic oligonucleotide
  Target: SCNA; (+) strand; PAM type: YTN; PAM sequence: TTT
gaattacaactatatgttta

SEQ ID NO: 83390 - DNA, 20 bp, Artificial Sequence
  Description of Artificial Sequence: Synthetic oligonucleotide
  Target: SCNA; (+) strand; PAM type: YTN; PAM sequence: TTG
aattacaactatatgtttaa

SEQ ID NO: 83391 - DNA, 20 bp, Artificial Sequence
  Description of Artificial Sequence: Synthetic oligonucleotide
  Target: SCNA; (+) strand; PAM type: YTN; PAM sequence: TTA
caactatatgtttaactctt

SEQ ID NO: 83392 - DNA, 20 bp, Artificial Sequence
  Description of Artificial Sequence: Synthetic oligonucleotide
  Target: SCNA; (+) strand; PAM type: YTN; PAM sequence: CTA
tatgtttaactcttgtcact

SEQ ID NO: 83393 - DNA, 20 bp, Artificial Sequence
  Description of Artificial Sequence: Synthetic oligonucleotide
  Target: SCNA; (+) strand; PAM type: YTN; PAM sequence: TTT
aactcttgtcactccttaaa

SEQ ID NO: 83394 - DNA, 20 bp, Artificial Sequence
  Description of Artificial Sequence: Synthetic oligonucleotide
  Target: SCNA; (+) strand; PAM type: YTN; PAM sequence: TTA
actcttgtcactccttaaaa

SEQ ID NO: 83395 - DNA, 20 bp, Artificial Sequence
  Description of Artificial Sequence: Synthetic oligonucleotide
  Target: SCNA; (+) strand; PAM type: YTN; PAM sequence: CTC
ttgtcactccttaaaatgcc

SEQ ID NO: 83396 - DNA, 20 bp, Artificial Sequence
  Description of Artificial Sequence: Synthetic oligonucleotide
  Target: SCNA; (+) strand; PAM type: YTN; PAM sequence: CTT
gtcactccttaaaatgcctt

SEQ ID NO: 83397 - DNA, 20 bp, Artificial Sequence
  Description of Artificial Sequence: Synthetic oligonucleotide
  Target: SCNA; (+) strand; PAM type: YTN; PAM sequence: TTG
tcactccttaaaatgccttg

SEQ ID NO: 83398 - DNA, 20 bp, Artificial Sequence
  Description of Artificial Sequence: Synthetic oligonucleotide
  Target: SCNA; (+) strand; PAM type: YTN; PAM sequence: CTC
cttaaaatgccttgaacaca

SEQ ID NO: 83399 - DNA, 20 bp, Artificial Sequence
  Description of Artificial Sequence: Synthetic oligonucleotide
  Target: SCNA; (+) strand; PAM type: YTN; PAM sequence: CTT
aaaatgccttgaacacagta

SEQ ID NO: 83400 - DNA, 20 bp, Artificial Sequence
  Description of Artificial Sequence: Synthetic oligonucleotide
  Target: SCNA; (+) strand; PAM type: YTN; PAM sequence: TTA
aaatgccttgaacacagtaa

SEQ ID NO: 83401 - DNA, 20 bp, Artificial Sequence
  Description of Artificial Sequence: Synthetic oligonucleotide
  Target: SCNA; (+) strand; PAM type: YTN; PAM sequence: CTT
gaacacagtaaacatccaat

SEQ ID NO: 83402 - DNA, 20 bp, Artificial Sequence
  Description of Artificial Sequence: Synthetic oligonucleotide
  Target: SCNA; (+) strand; PAM type: YTN; PAM sequence: TTG
aacacagtaaacatccaatg

SEQ ID NO: 83403 - DNA, 20 bp, Artificial Sequence
  Description of Artificial Sequence: Synthetic oligonucleotide
  Target: SCNA; (+) strand; PAM type: YTN; PAM sequence: CTT
ttaattacacataatattga

SEQ ID NO: 83404 - DNA, 20 bp, Artificial Sequence
  Description of Artificial Sequence: Synthetic oligonucleotide
  Target: SCNA; (+) strand; PAM type: YTN; PAM sequence: TTT
taattacacataatattgat

SEQ ID NO: 83405 - DNA, 20 bp, Artificial Sequence
  Description of Artificial Sequence: Synthetic oligonucleotide
  Target: SCNA; (+) strand; PAM type: YTN; PAM sequence: TTT
aattacacataatattgata

SEQ ID NO: 83406 - DNA, 20 bp, Artificial Sequence
  Description of Artificial Sequence: Synthetic oligonucleotide
  Target: SCNA; (+) strand; PAM type: YTN; PAM sequence: TTA
attacacataatattgatag

SEQ ID NO: 83407 - DNA, 20 bp, Artificial Sequence
  Description of Artificial Sequence: Synthetic oligonucleotide
  Target: SCNA; (+) strand; PAM type: YTN; PAM sequence: TTA
cacataatattgatagtgat

SEQ ID NO: 83408 - DNA, 20 bp, Artificial Sequence
  Description of Artificial Sequence: Synthetic oligonucleotide
  Target: SCNA; (+) strand; PAM type: YTN; PAM sequence: TTG
atagtgatattgcatatgtt

SEQ ID NO: 83409 - DNA, 20 bp, Artificial Sequence
  Description of Artificial Sequence: Synthetic oligonucleotide
  Target: SCNA; (+) strand; PAM type: YTN; PAM sequence: TTG
catatgttctaggtctgtat

SEQ ID NO: 83410 - DNA, 20 bp, Artificial Sequence
  Description of Artificial Sequence: Synthetic oligonucleotide
  Target: SCNA; (+) strand; PAM type: YTN; PAM sequence: TTC
taggtctgtattcttaagga

SEQ ID NO: 83411 - DNA, 20 bp, Artificial Sequence
  Description of Artificial Sequence: Synthetic oligonucleotide
  Target: SCNA; (+) strand; PAM type: YTN; PAM sequence: CTA
ggtctgtattcttaaggagg

SEQ ID NO: 83412 - DNA, 20 bp, Artificial Sequence
  Description of Artificial Sequence: Synthetic oligonucleotide
  Target: SCNA; (+) strand; PAM type: YTN; PAM sequence: CTG
tattcttaaggagggaaagc

SEQ ID NO: 83413 - DNA, 20 bp, Artificial Sequence
  Description of Artificial Sequence: Synthetic oligonucleotide
  Target: SCNA; (+) strand; PAM type: YTN; PAM sequence: TTC
ttaaggagggaaagctgctc

SEQ ID NO: 83414 - DNA, 20 bp, Artificial Sequence
  Description of Artificial Sequence: Synthetic oligonucleotide
  Target: SCNA; (+) strand; PAM type: YTN; PAM sequence: CTT
aaggagggaaagctgctcaa

SEQ ID NO: 83415 - DNA, 20 bp, Artificial Sequence
  Description of Artificial Sequence: Synthetic oligonucleotide
  Target: SCNA; (+) strand; PAM type: YTN; PAM sequence: TTA
aggagggaaagctgctcaag

SEQ ID NO: 83416 - DNA, 20 bp, Artificial Sequence
  Description of Artificial Sequence: Synthetic oligonucleotide
  Target: SCNA; (+) strand; PAM type: YTN; PAM sequence: CTG
ctcaagtacaaagaagggaa

SEQ ID NO: 83417 - DNA, 20 bp, Artificial Sequence
  Description of Artificial Sequence: Synthetic oligonucleotide
  Target: SCNA; (+) strand; PAM type: YTN; PAM sequence: CTC
aagtacaaagaagggaacta

SEQ ID NO: 83418 - DNA, 20 bp, Artificial Sequence
  Description of Artificial Sequence: Synthetic oligonucleotide
  Target: SCNA; (+) strand; PAM type: YTN; PAM sequence: CTA
gaagttaaaataaagttttt

SEQ ID NO: 83419 - DNA, 20 bp, Artificial Sequence
  Description of Artificial Sequence: Synthetic oligonucleotide
  Target: SCNA; (+) strand; PAM type: YTN; PAM sequence: TTA
aaataaagtttttttaattt

SEQ ID NO: 83420 - DNA, 20 bp, Artificial Sequence
  Description of Artificial Sequence: Synthetic oligonucleotide
  Target: SCNA; (+) strand; PAM type: YTN; PAM sequence: TTT
ttttaatttttcttttcatt

SEQ ID NO: 83421 - DNA, 20 bp, Artificial Sequence
  Description of Artificial Sequence: Synthetic oligonucleotide
  Target: SCNA; (+) strand; PAM type: YTN; PAM sequence: TTT
tttaatttttcttttcatta

SEQ ID NO: 83422 - DNA, 20 bp, Artificial Sequence
  Description of Artificial Sequence: Synthetic oligonucleotide
  Target: SCNA; (+) strand; PAM type: YTN; PAM sequence: TTT
ttaatttttcttttcattat

SEQ ID NO: 83423 - DNA, 20 bp, Artificial Sequence
  Description of Artificial Sequence: Synthetic oligonucleotide
  Target: SCNA; (+) strand; PAM type: YTN; PAM sequence: TTT
taatttttcttttcattatt

SEQ ID NO: 83424 - DNA, 20 bp, Artificial Sequence
  Description of Artificial Sequence: Synthetic oligonucleotide
  Target: SCNA; (+) strand; PAM type: YTN; PAM sequence: TTT
aatttttcttttcattattg

SEQ ID NO: 83425 - DNA, 20 bp, Artificial Sequence
  Description of Artificial Sequence: Synthetic oligonucleotide
  Target: SCNA; (+) strand; PAM type: YTN; PAM sequence: TTA
atttttcttttcattattga

SEQ ID NO: 83426 - DNA, 20 bp, Artificial Sequence
  Description of Artificial Sequence: Synthetic oligonucleotide
  Target: SCNA; (+) strand; PAM type: YTN; PAM sequence: TTT
ttcttttcattattgatgga

SEQ ID NO: 83427 - DNA, 20 bp, Artificial Sequence
  Description of Artificial Sequence: Synthetic oligonucleotide
  Target: SCNA; (+) strand; PAM type: YTN; PAM sequence: TTT
tcttttcattattgatggac

SEQ ID NO: 83428 - DNA, 20 bp, Artificial Sequence
  Description of Artificial Sequence: Synthetic oligonucleotide
  Target: SCNA; (+) strand; PAM type: YTN; PAM sequence: TTT
cttttcattattgatggaca

SEQ ID NO: 83429 - DNA, 20 bp, Artificial Sequence
  Description of Artificial Sequence: Synthetic oligonucleotide
  Target: SCNA; (+) strand; PAM type: YTN; PAM sequence: TTC
ttttcattattgatggacag

SEQ ID NO: 83430 - DNA, 20 bp, Artificial Sequence
  Description of Artificial Sequence: Synthetic oligonucleotide
  Target: SCNA; (+) strand; PAM type: YTN; PAM sequence: CTT
ttcattattgatggacagca

SEQ ID NO: 83431 - DNA, 20 bp, Artificial Sequence
  Description of Artificial Sequence: Synthetic oligonucleotide
  Target: SCNA; (+) strand; PAM type: YTN; PAM sequence: TTT
tcattattgatggacagcat

SEQ ID NO: 83432 - DNA, 20 bp, Artificial Sequence
  Description of Artificial Sequence: Synthetic oligonucleotide
  Target: SCNA; (+) strand; PAM type: YTN; PAM sequence: TTT
cattattgatggacagcatg

SEQ ID NO: 83433 - DNA, 20 bp, Artificial Sequence
  Description of Artificial Sequence: Synthetic oligonucleotide
  Target: SCNA; (+) strand; PAM type: YTN; PAM sequence: TTC
attattgatggacagcatgg

SEQ ID NO: 83434 - DNA, 20 bp, Artificial Sequence
  Description of Artificial Sequence: Synthetic oligonucleotide
  Target: SCNA; (+) strand; PAM type: YTN; PAM sequence: TTA
ttgatggacagcatggtctt

SEQ ID NO: 83435 - DNA, 20 bp, Artificial Sequence
  Description of Artificial Sequence: Synthetic oligonucleotide
  Target: SCNA; (+) strand; PAM type: YTN; PAM sequence: TTG
atggacagcatggtcttcag

SEQ ID NO: 83436 - DNA, 20 bp, Artificial Sequence
  Description of Artificial Sequence: Synthetic oligonucleotide
  Target: SCNA; (+) strand; PAM type: YTN; PAM sequence: CTT
cagtaaatctttagcctctc

SEQ ID NO: 83437 - DNA, 20 bp, Artificial Sequence
  Description of Artificial Sequence: Synthetic oligonucleotide
  Target: SCNA; (+) strand; PAM type: YTN; PAM sequence: TTC
agtaaatctttagcctctct

SEQ ID NO: 83438 - DNA, 20 bp, Artificial Sequence
  Description of Artificial Sequence: Synthetic oligonucleotide
  Target: SCNA; (+) strand; PAM type: YTN; PAM sequence: CTT
tagcctctctgaatataacg

SEQ ID NO: 83439 - DNA, 20 bp, Artificial Sequence
  Description of Artificial Sequence: Synthetic oligonucleotide
  Target: SCNA; (+) strand; PAM type: YTN; PAM sequence: TTT
agcctctctgaatataacgt

SEQ ID NO: 83440 - DNA, 20 bp, Artificial Sequence
  Description of Artificial Sequence: Synthetic oligonucleotide
  Target: SCNA; (+) strand; PAM type: YTN; PAM sequence: TTA
gcctctctgaatataacgtt

SEQ ID NO: 83441 - DNA, 20 bp, Artificial Sequence
  Description of Artificial Sequence: Synthetic oligonucleotide
  Target: SCNA; (+) strand; PAM type: YTN; PAM sequence: CTC
tctgaatataacgttaaact

SEQ ID NO: 83442 - DNA, 20 bp, Artificial Sequence
  Description of Artificial Sequence: Synthetic oligonucleotide
  Target: SCNA; (+) strand; PAM type: YTN; PAM sequence: CTC
tgaatataacgttaaactaa

SEQ ID NO: 83443 - DNA, 20 bp, Artificial Sequence
  Description of Artificial Sequence: Synthetic oligonucleotide
  Target: SCNA; (+) strand; PAM type: YTN; PAM sequence: CTG
aatataacgttaaactaatt

SEQ ID NO: 83444 - DNA, 20 bp, Artificial Sequence
  Description of Artificial Sequence: Synthetic oligonucleotide
  Target: SCNA; (+) strand; PAM type: YTN; PAM sequence: TTA
aactaattgaatggcttgta

SEQ ID NO: 83445 - DNA, 20 bp, Artificial Sequence
  Description of Artificial Sequence: Synthetic oligonucleotide
  Target: SCNA; (+) strand; PAM type: YTN; PAM sequence: CTA
attgaatggcttgtacctca

SEQ ID NO: 83446 - DNA, 20 bp, Artificial Sequence
  Description of Artificial Sequence: Synthetic oligonucleotide
  Target: SCNA; (+) strand; PAM type: YTN; PAM sequence: TTG
aatggcttgtacctcataag

SEQ ID NO: 83447 - DNA, 20 bp, Artificial Sequence
  Description of Artificial Sequence: Synthetic oligonucleotide
  Target: SCNA; (+) strand; PAM type: YTN; PAM sequence: CTT
gtacctcataagaaatatga

SEQ ID NO: 83448 - DNA, 20 bp, Artificial Sequence
  Description of Artificial Sequence: Synthetic oligonucleotide
  Target: SCNA; (+) strand; PAM type: YTN; PAM sequence: TTG
tacctcataagaaatatgaa

SEQ ID NO: 83449 - DNA, 20 bp, Artificial Sequence
  Description of Artificial Sequence: Synthetic oligonucleotide
  Target: SCNA; (+) strand; PAM type: YTN; PAM sequence: CTC
ataagaaatatgaagttatg

SEQ ID NO: 83450 - DNA, 20 bp, Artificial Sequence
  Description of Artificial Sequence: Synthetic oligonucleotide
  Target: SCNA; (+) strand; PAM type: YTN; PAM sequence: TTA
tgaagtaataacatatttgg

SEQ ID NO: 83451 - DNA, 20 bp, Artificial Sequence
  Description of Artificial Sequence: Synthetic oligonucleotide
  Target: SCNA; (+) strand; PAM type: YTN; PAM sequence: TTT
ggaagcattactaacatgca

SEQ ID NO: 83452 - DNA, 20 bp, Artificial Sequence
  Description of Artificial Sequence: Synthetic oligonucleotide
  Target: SCNA; (+) strand; PAM type: YTN; PAM sequence: TTG
gaagcattactaacatgcat

SEQ ID NO: 83453 - DNA, 20 bp, Artificial Sequence
  Description of Artificial Sequence: Synthetic oligonucleotide
  Target: SCNA; (+) strand; PAM type: YTN; PAM sequence: TTA
ctaacatgcatattctgttc

SEQ ID NO: 83454 - DNA, 20 bp, Artificial Sequence
  Description of Artificial Sequence: Synthetic oligonucleotide
  Target: SCNA; (+) strand; PAM type: YTN; PAM sequence: CTA
acatgcatattctgttcata

SEQ ID NO: 83455 - DNA, 20 bp, Artificial Sequence
  Description of Artificial Sequence: Synthetic oligonucleotide
  Target: SCNA; (+) strand; PAM type: YTN; PAM sequence: TTC
tgttcataactacaatattc

SEQ ID NO: 83456 - DNA, 20 bp, Artificial Sequence
  Description of Artificial Sequence: Synthetic oligonucleotide
  Target: SCNA; (+) strand; PAM type: YTN; PAM sequence: CTG
ttcataactacaatattcat

SEQ ID NO: 83457 - DNA, 20 bp, Artificial Sequence
  Description of Artificial Sequence: Synthetic oligonucleotide
  Target: SCNA; (+) strand; PAM type: YTN; PAM sequence: TTC
ataactacaatattcatgtt

SEQ ID NO: 83458 - DNA, 20 bp, Artificial Sequence
  Description of Artificial Sequence: Synthetic oligonucleotide
  Target: SCNA; (+) strand; PAM type: YTN; PAM sequence: CTA
caatattcatgttttgtttt

SEQ ID NO: 83459 - DNA, 20 bp, Artificial Sequence
  Description of Artificial Sequence: Synthetic oligonucleotide
  Target: SCNA; (+) strand; PAM type: YTN; PAM sequence: TTC
atgttttgttttctctttgc

SEQ ID NO: 83460 - DNA, 20 bp, Artificial Sequence
  Description of Artificial Sequence: Synthetic oligonucleotide
  Target: SCNA; (+) strand; PAM type: YTN; PAM sequence: TTT
tgttttctctttgctaagtg

SEQ ID NO: 83461 - DNA, 20 bp, Artificial Sequence
  Description of Artificial Sequence: Synthetic oligonucleotide
  Target: SCNA; (+) strand; PAM type: YTN; PAM sequence: TTT
gttttctctttgctaagtga

SEQ ID NO: 83462 - DNA, 20 bp, Artificial Sequence
  Description of Artificial Sequence: Synthetic oligonucleotide
  Target: SCNA; (+) strand; PAM type: YTN; PAM sequence: TTG
ttttctctttgctaagtgaa

SEQ ID NO: 83463 - DNA, 20 bp, Artificial Sequence
  Description of Artificial Sequence: Synthetic oligonucleotide
  Target: SCNA; (+) strand; PAM type: YTN; PAM sequence: TTT
tctctttgctaagtgaaata

SEQ ID NO: 83464 - DNA, 20 bp, Artificial Sequence
  Description of Artificial Sequence: Synthetic oligonucleotide
  Target: SCNA; (+) strand; PAM type: YTN; PAM sequence: TTT
ctctttgctaagtgaaatat

SEQ ID NO: 83465 - DNA, 20 bp, Artificial Sequence
  Description of Artificial Sequence: Synthetic oligonucleotide
  Target: SCNA; (+) strand; PAM type: YTN; PAM sequence: TTC
tctttgctaagtgaaatata

SEQ ID NO: 83466 - DNA, 20 bp, Artificial Sequence
  Description of Artificial Sequence: Synthetic oligonucleotide
  Target: SCNA; (+) strand; PAM type: YTN; PAM sequence: CTC
tttgctaagtgaaatataaa

SEQ ID NO: 83467 - DNA, 20 bp, Artificial Sequence
  Description of Artificial Sequence: Synthetic oligonucleotide
  Target: SCNA; (+) strand; PAM type: YTN; PAM sequence: CTT
tgctaagtgaaatataaata

SEQ ID NO: 83468 - DNA, 20 bp, Artificial Sequence
  Description of Artificial Sequence: Synthetic oligonucleotide
  Target: SCNA; (+) strand; PAM type: YTN; PAM sequence: TTT
gctaagtgaaatataaatat

SEQ ID NO: 83469 - DNA, 20 bp, Artificial Sequence
  Description of Artificial Sequence: Synthetic oligonucleotide
  Target: SCNA; (+) strand; PAM type: YTN; PAM sequence: TTG
ctaagtgaaatataaatatt

SEQ ID NO: 83470 - DNA, 20 bp, Artificial Sequence
  Description of Artificial Sequence: Synthetic oligonucleotide
  Target: SCNA; (+) strand; PAM type: YTN; PAM sequence: CTA
agtgaaatataaatatttta

SEQ ID NO: 83471 - DNA, 20 bp, Artificial Sequence
  Description of Artificial Sequence: Synthetic oligonucleotide
  Target: SCNA; (+) strand; PAM type: YTN; PAM sequence: TTT
taccagaccataataggatt

SEQ ID NO: 83472 - DNA, 20 bp, Artificial Sequence
  Description of Artificial Sequence: Synthetic oligonucleotide
  Target: SCNA; (+) strand; PAM type: YTN; PAM sequence: TTT
accagaccataataggattc

SEQ ID NO: 83473 - DNA, 20 bp, Artificial Sequence
  Description of Artificial Sequence: Synthetic oligonucleotide
  Target: SCNA; (+) strand; PAM type: YTN; PAM sequence: TTA
ccagaccataataggattct

SEQ ID NO: 83474 - DNA, 20 bp, Artificial Sequence
  Description of Artificial Sequence: Synthetic oligonucleotide
  Target: SCNA; (+) strand; PAM type: YTN; PAM sequence: TTC
ttttatctggatttaattca

SEQ ID NO: 83475 - DNA, 20 bp, Artificial Sequence
  Description of Artificial Sequence: Synthetic oligonucleotide
  Target: SCNA; (+) strand; PAM type: YTN; PAM sequence: CTT
ttatctggatttaattcatt

SEQ ID NO: 83476 - DNA, 20 bp, Artificial Sequence
  Description of Artificial Sequence: Synthetic oligonucleotide
  Target: SCNA; (+) strand; PAM type: YTN; PAM sequence: TTT
tatctggatttaattcatta

SEQ ID NO: 83477 - DNA, 20 bp, Artificial Sequence
  Description of Artificial Sequence: Synthetic oligonucleotide
  Target: SCNA; (+) strand; PAM type: YTN; PAM sequence: TTT
atctggatttaattcattaa

SEQ ID NO: 83478 - DNA, 20 bp, Artificial Sequence
  Description of Artificial Sequence: Synthetic oligonucleotide
  Target: SCNA; (+) strand; PAM type: YTN; PAM sequence: TTA
tctggatttaattcattaat

SEQ ID NO: 83479 - DNA, 20 bp, Artificial Sequence
  Description of Artificial Sequence: Synthetic oligonucleotide
  Target: SCNA; (+) strand; PAM type: YTN; PAM sequence: CTG
gatttaattcattaattttg

SEQ ID NO: 83480 - DNA, 20 bp, Artificial Sequence
  Description of Artificial Sequence: Synthetic oligonucleotide
  Target: SCNA; (+) strand; PAM type: YTN; PAM sequence: TTT
aattcattaattttgctata

SEQ ID NO: 83481 - DNA, 20 bp, Artificial Sequence
  Description of Artificial Sequence: Synthetic oligonucleotide
  Target: SCNA; (+) strand; PAM type: YTN; PAM sequence: TTA
attcattaattttgctatag

SEQ ID NO: 83482 - DNA, 20 bp, Artificial Sequence
  Description of Artificial Sequence: Synthetic oligonucleotide
  Target: SCNA; (+) strand; PAM type: YTN; PAM sequence: TTC
attaattttgctatagatta

SEQ ID NO: 83483 - DNA, 20 bp, Artificial Sequence
  Description of Artificial Sequence: Synthetic oligonucleotide
  Target: SCNA; (+) strand; PAM type: YTN; PAM sequence: TTA
attttgctatagattaacat

SEQ ID NO: 83484 - DNA, 20 bp, Artificial Sequence
  Description of Artificial Sequence: Synthetic oligonucleotide
  Target: SCNA; (+) strand; PAM type: YTN; PAM sequence: TTT
tgctatagattaacattcta

SEQ ID NO: 83485 - DNA, 20 bp, Artificial Sequence
  Description of Artificial Sequence: Synthetic oligonucleotide
  Target: SCNA; (+) strand; PAM type: YTN; PAM sequence: TTT
gctatagattaacattctat

SEQ ID NO: 83486 - DNA, 20 bp, Artificial Sequence
  Description of Artificial Sequence: Synthetic oligonucleotide
  Target: SCNA; (+) strand; PAM type: YTN; PAM sequence: TTG
ctatagattaacattctatg

SEQ ID NO: 83487 - DNA, 20 bp, Artificial Sequence
  Description of Artificial Sequence: Synthetic oligonucleotide
  Target: SCNA; (+) strand; PAM type: YTN; PAM sequence: CTA
tagattaacattctatgaaa

SEQ ID NO: 83488 - DNA, 20 bp, Artificial Sequence
  Description of Artificial Sequence: Synthetic oligonucleotide
  Target: SCNA; (+) strand; PAM type: YTN; PAM sequence: TTA
acattctatgaaatatatgc

SEQ ID NO: 83489 - DNA, 20 bp, Artificial Sequence
  Description of Artificial Sequence: Synthetic oligonucleotide
  Target: SCNA; (+) strand; PAM type: YTN; PAM sequence: TTC
tatgaaatatatgcttaacc

SEQ ID NO: 83490 - DNA, 20 bp, Artificial Sequence
  Description of Artificial Sequence: Synthetic oligonucleotide
  Target: SCNA; (+) strand; PAM type: YTN; PAM sequence: CTA
tgaaatatatgcttaaccta

SEQ ID NO: 83491 - DNA, 20 bp, Artificial Sequence
  Description of Artificial Sequence: Synthetic oligonucleotide
  Target: SCNA; (+) strand; PAM type: YTN; PAM sequence: CTT
aacctagactttgtttaccc

SEQ ID NO: 83492 - DNA, 20 bp, Artificial Sequence
  Description of Artificial Sequence: Synthetic oligonucleotide
  Target: SCNA; (+) strand; PAM type: YTN; PAM sequence: TTA
acctagactttgtttacccc

SEQ ID NO: 83493 - DNA, 20 bp, Artificial Sequence
  Description of Artificial Sequence: Synthetic oligonucleotide
  Target: SCNA; (+) strand; PAM type: YTN; PAM sequence: CTA
gactttgtttacccccatag

SEQ ID NO: 83494 - DNA, 20 bp, Artificial Sequence
  Description of Artificial Sequence: Synthetic oligonucleotide
  Target: SCNA; (+) strand; PAM type: YTN; PAM sequence: CTT
tgtttacccccatagaacaa

SEQ ID NO: 83495 - DNA, 20 bp, Artificial Sequence
  Description of Artificial Sequence: Synthetic oligonucleotide
  Target: SCNA; (+) strand; PAM type: YTN; PAM sequence: TTT
gtttacccccatagaacaac

SEQ ID NO: 83496 - DNA, 20 bp, Artificial Sequence
  Description of Artificial Sequence: Synthetic oligonucleotide
  Target: SCNA; (+) strand; PAM type: YTN; PAM sequence: TTG
tttacccccatagaacaact

SEQ ID NO: 83497 - DNA, 20 bp, Artificial Sequence
  Description of Artificial Sequence: Synthetic oligonucleotide
  Target: SCNA; (+) strand; PAM type: YTN; PAM sequence: TTT
acccccatagaacaactgaa

SEQ ID NO: 83498 - DNA, 20 bp, Artificial Sequence
  Description of Artificial Sequence: Synthetic oligonucleotide
  Target: SCNA; (+) strand; PAM type: YTN; PAM sequence: TTA
cccccatagaacaactgaat

SEQ ID NO: 83499 - DNA, 20 bp, Artificial Sequence
  Description of Artificial Sequence: Synthetic oligonucleotide
  Target: SCNA; (+) strand; PAM type: YTN; PAM sequence: CTG
aatttttaggtatggtatgt

SEQ ID NO: 83500 - DNA, 20 bp, Artificial Sequence
  Description of Artificial Sequence: Synthetic oligonucleotide
  Target: SCNA; (+) strand; PAM type: YTN; PAM sequence: TTT
ttaggtatggtatgtggtaa

SEQ ID NO: 83501 - DNA, 20 bp, Artificial Sequence
  Description of Artificial Sequence: Synthetic oligonucleotide
  Target: SCNA; (+) strand; PAM type: YTN; PAM sequence: TTT
taggtatggtatgtggtaaa

SEQ ID NO: 83502 - DNA, 20 bp, Artificial Sequence
  Description of Artificial Sequence: Synthetic oligonucleotide
  Target: SCNA; (+) strand; PAM type: YTN; PAM sequence: TTT
aggtatggtatgtggtaaac

SEQ ID NO: 83503 - DNA, 20 bp, Artificial Sequence
  Description of Artificial Sequence: Synthetic oligonucleotide
  Target: SCNA; (+) strand; PAM type: YTN; PAM sequence: TTA
ggtatggtatgtggtaaact

SEQ ID NO: 83504 - DNA, 20 bp, Artificial Sequence
  Description of Artificial Sequence: Synthetic oligonucleotide
  Target: SCNA; (+) strand; PAM type: YTN; PAM sequence: CTT
gtgctatagcaaagacagca

SEQ ID NO: 83505 - DNA, 20 bp, Artificial Sequence
  Description of Artificial Sequence: Synthetic oligonucleotide
  Target: SCNA; (+) strand; PAM type: YTN; PAM sequence: TTG
tgctatagcaaagacagcag

SEQ ID NO: 83506 - DNA, 20 bp, Artificial Sequence
  Description of Artificial Sequence: Synthetic oligonucleotide
  Target: SCNA; (+) strand; PAM type: YTN; PAM sequence: CTA
tagcaaagacagcagagtag

SEQ ID NO: 83507 - DNA, 20 bp, Artificial Sequence
  Description of Artificial Sequence: Synthetic oligonucleotide
  Target: SCNA; (+) strand; PAM type: YTN; PAM sequence: CTG
cccattaacaattgattaaa

SEQ ID NO: 83508 - DNA, 20 bp, Artificial Sequence
  Description of Artificial Sequence: Synthetic oligonucleotide
  Target: SCNA; (+) strand; PAM type: YTN; PAM sequence: TTA
acaattgattaaagagagga

SEQ ID NO: 83509 - DNA, 20 bp, Artificial Sequence
  Description of Artificial Sequence: Synthetic oligonucleotide
  Target: SCNA; (+) strand; PAM type: YTN; PAM sequence: TTG
attaaagagaggactgattt

SEQ ID NO: 83510 - DNA, 20 bp, Artificial Sequence
  Description of Artificial Sequence: Synthetic oligonucleotide
  Target: SCNA; (+) strand; PAM type: YTN; PAM sequence: TTA
aagagaggactgatttaatg

SEQ ID NO: 83511 - DNA, 20 bp, Artificial Sequence
  Description of Artificial Sequence: Synthetic oligonucleotide
  Target: SCNA; (+) strand; PAM type: YTN; PAM sequence: CTG
atttaatgtgtttaagttaa

SEQ ID NO: 83512 - DNA, 20 bp, Artificial Sequence
  Description of Artificial Sequence: Synthetic oligonucleotide
  Target: SCNA; (+) strand; PAM type: YTN; PAM sequence: TTT
aatgtgtttaagttaagaaa

SEQ ID NO: 83513 - DNA, 20 bp, Artificial Sequence
  Description of Artificial Sequence: Synthetic oligonucleotide
  Target: SCNA; (+) strand; PAM type: YTN; PAM sequence: TTA
atgtgtttaagttaagaaaa

SEQ ID NO: 83514 - DNA, 20 bp, Artificial Sequence
  Description of Artificial Sequence: Synthetic oligonucleotide
  Target: SCNA; (+) strand; PAM type: YTN; PAM sequence: TTT
aagttaagaaaatacaacgt

SEQ ID NO: 83515 - DNA, 20 bp, Artificial Sequence
  Description of Artificial Sequence: Synthetic oligonucleotide
  Target: SCNA; (+) strand; PAM type: YTN; PAM sequence: TTA
agttaagaaaatacaacgtt

SEQ ID NO: 83516 - DNA, 20 bp, Artificial Sequence
  Description of Artificial Sequence: Synthetic oligonucleotide
  Target: SCNA; (+) strand; PAM type: YTN; PAM sequence: TTA
agaaaatacaacgtttatta

SEQ ID NO: 83517 - DNA, 20 bp, Artificial Sequence
  Description of Artificial Sequence: Synthetic oligonucleotide
  Target: SCNA; (+) strand; PAM type: YTN; PAM sequence: TTT
attatctttggataatattc

SEQ ID NO: 83518 - DNA, 20 bp, Artificial Sequence
  Description of Artificial Sequence: Synthetic oligonucleotide
  Target: SCNA; (+) strand; PAM type: YTN; PAM sequence: TTA
ttatctttggataatattcc

SEQ ID NO: 83519 - DNA, 20 bp, Artificial Sequence
  Description of Artificial Sequence: Synthetic oligonucleotide
  Target: SCNA; (+) strand; PAM type: YTN; PAM sequence: TTA
tctttggataatattccgta

SEQ ID NO: 83520 - DNA, 20 bp, Artificial Sequence
  Description of Artificial Sequence: Synthetic oligonucleotide
  Target: SCNA; (+) strand; PAM type: YTN; PAM sequence: CTT
tggataatattccgtatttg

SEQ ID NO: 83521 - DNA, 20 bp, Artificial Sequence
  Description of Artificial Sequence: Synthetic oligonucleotide
  Target: SCNA; (+) strand; PAM type: YTN; PAM sequence: TTT
ggataatattccgtatttgt

SEQ ID NO: 83522 - DNA, 20 bp, Artificial Sequence
  Description of Artificial Sequence: Synthetic oligonucleotide
  Target: SCNA; (+) strand; PAM type: YTN; PAM sequence: TTG
gataatattccgtatttgtt

SEQ ID NO: 83523 - DNA, 20 bp, Artificial Sequence
  Description of Artificial Sequence: Synthetic oligonucleotide
  Target: SCNA; (+) strand; PAM type: YTN; PAM sequence: TTC
cgtatttgttgtgaacacaa

SEQ ID NO: 83524 - DNA, 20 bp, Artificial Sequence
  Description of Artificial Sequence: Synthetic oligonucleotide
  Target: SCNA; (+) strand; PAM type: YTN; PAM sequence: TTT
gttgtgaacacaaggggtga

SEQ ID NO: 83525 - DNA, 20 bp, Artificial Sequence
  Description of Artificial Sequence: Synthetic oligonucleotide
  Target: SCNA; (+) strand; PAM type: YTN; PAM sequence: TTG
ttgtgaacacaaggggtgat

SEQ ID NO: 83526 - DNA, 20 bp, Artificial Sequence
  Description of Artificial Sequence: Synthetic oligonucleotide
  Target: SCNA; (+) strand; PAM type: YTN; PAM sequence: TTG
tgaacacaaggggtgatgta

SEQ ID NO: 83527 - DNA, 20 bp, Artificial Sequence
  Description of Artificial Sequence: Synthetic oligonucleotide
  Target: SCNA; (+) strand; PAM type: YTN; PAM sequence: TTG
atgctggagccacctgcttc

SEQ ID NO: 83528 - DNA, 20 bp, Artificial Sequence
  Description of Artificial Sequence: Synthetic oligonucleotide
  Target: SCNA; (+) strand; PAM type: YTN; PAM sequence: CTG
gagccacctgcttcttattc

SEQ ID NO: 83529 - DNA, 20 bp, Artificial Sequence
  Description of Artificial Sequence: Synthetic oligonucleotide
  Target: SCNA; (+) strand; PAM type: YTN; PAM sequence: CTG
cttcttattctctatctgca

SEQ ID NO: 83530 - DNA, 20 bp, Artificial Sequence
  Description of Artificial Sequence: Synthetic oligonucleotide
  Target: SCNA; (+) strand; PAM type: YTN; PAM sequence: CTT
cttattctctatctgcacct

SEQ ID NO: 83531 - DNA, 20 bp, Artificial Sequence
  Description of Artificial Sequence: Synthetic oligonucleotide
  Target: SCNA; (+) strand; PAM type: YTN; PAM sequence: TTC
ttattctctatctgcacctt

SEQ ID NO: 83532 - DNA, 20 bp, Artificial Sequence
  Description of Artificial Sequence: Synthetic oligonucleotide
  Target: SCNA; (+) strand; PAM type: YTN; PAM sequence: CTT
attctctatctgcaccttcc

SEQ ID NO: 83533 - DNA, 20 bp, Artificial Sequence
  Description of Artificial Sequence: Synthetic oligonucleotide
  Target: SCNA; (+) strand; PAM type: YTN; PAM sequence: TTA
ttctctatctgcaccttcct

SEQ ID NO: 83534 - DNA, 20 bp, Artificial Sequence
  Description of Artificial Sequence: Synthetic oligonucleotide
  Target: SCNA; (+) strand; PAM type: YTN; PAM sequence: TTC
tctatctgcaccttcctctc

SEQ ID NO: 83535 - DNA, 20 bp, Artificial Sequence
  Description of Artificial Sequence: Synthetic oligonucleotide
  Target: SCNA; (+) strand; PAM type: YTN; PAM sequence: CTC
tatctgcaccttcctctcac

SEQ ID NO: 83536 - DNA, 20 bp, Artificial Sequence
  Description of Artificial Sequence: Synthetic oligonucleotide
  Target: SCNA; (+) strand; PAM type: YTN; PAM sequence: CTA
tctgcaccttcctctcacct

SEQ ID NO: 83537 - DNA, 20 bp, Artificial Sequence
  Description of Artificial Sequence: Synthetic oligonucleotide
  Target: SCNA; (+) strand; PAM type: YTN; PAM sequence: CTG
caccttcctctcaccttctg

SEQ ID NO: 83538 - DNA, 20 bp, Artificial Sequence
  Description of Artificial Sequence: Synthetic oligonucleotide
  Target: SCNA; (+) strand; PAM type: YTN; PAM sequence: CTT
cctctcaccttctgtaaacc

SEQ ID NO: 83539 - DNA, 20 bp, Artificial Sequence
  Description of Artificial Sequence: Synthetic oligonucleotide
  Target: SCNA; (+) strand; PAM type: YTN; PAM sequence: TTC
ctctcaccttctgtaaacct

SEQ ID NO: 83540 - DNA, 20 bp, Artificial Sequence
  Description of Artificial Sequence: Synthetic oligonucleotide
  Target: SCNA; (+) strand; PAM type: YTN; PAM sequence: CTC
tcaccttctgtaaacctgtg

SEQ ID NO: 83541 - DNA, 20 bp, Artificial Sequence
  Description of Artificial Sequence: Synthetic oligonucleotide
  Target: SCNA; (+) strand; PAM type: YTN; PAM sequence: CTC
accttctgtaaacctgtgag

SEQ ID NO: 83542 - DNA, 20 bp, Artificial Sequence
  Description of Artificial Sequence: Synthetic oligonucleotide
  Target: SCNA; (+) strand; PAM type: YTN; PAM sequence: CTT
ctgtaaacctgtgagagaga

SEQ ID NO: 83543 - DNA, 20 bp, Artificial Sequence
  Description of Artificial Sequence: Synthetic oligonucleotide
  Target: SCNA; (+) strand; PAM type: YTN; PAM sequence: TTC
tgtaaacctgtgagagagac

SEQ ID NO: 83544 - DNA, 20 bp, Artificial Sequence
  Description of Artificial Sequence: Synthetic oligonucleotide
  Target: SCNA; (+) strand; PAM type: YTN; PAM sequence: CTG
taaacctgtgagagagacga

SEQ ID NO: 83545 - DNA, 20 bp, Artificial Sequence
  Description of Artificial Sequence: Synthetic oligonucleotide
  Target: SCNA; (+) strand; PAM type: YTN; PAM sequence: CTG
tgagagagacgaggtagtga

SEQ ID NO: 83546 - DNA, 20 bp, Artificial Sequence
  Description of Artificial Sequence: Synthetic oligonucleotide
  Target: SCNA; (+) strand; PAM type: YTN; PAM sequence: TTG
cgataggcttcttgtgtaat

SEQ ID NO: 83547 - DNA, 20 bp, Artificial Sequence
  Description of Artificial Sequence: Synthetic oligonucleotide
  Target: SCNA; (+) strand; PAM type: YTN; PAM sequence: CTT
cttgtgtaatttcatagtgg

SEQ ID NO: 83548 - DNA, 20 bp, Artificial Sequence
  Description of Artificial Sequence: Synthetic oligonucleotide
  Target: SCNA; (+) strand; PAM type: YTN; PAM sequence: TTC
ttgtgtaatttcatagtggg

SEQ ID NO: 83549 - DNA, 20 bp, Artificial Sequence
  Description of Artificial Sequence: Synthetic oligonucleotide
  Target: SCNA; (+) strand; PAM type: YTN; PAM sequence: CTT
gtgtaatttcatagtgggta

SEQ ID NO: 83550 - DNA, 20 bp, Artificial Sequence
  Description of Artificial Sequence: Synthetic oligonucleotide
  Target: SCNA; (+) strand; PAM type: YTN; PAM sequence: TTG
tgtaatttcatagtgggtag

SEQ ID NO: 83551 - DNA, 20 bp, Artificial Sequence
  Description of Artificial Sequence: Synthetic oligonucleotide
  Target: SCNA; (+) strand; PAM type: YTN; PAM sequence: TTT
catagtgggtagagtagaga

SEQ ID NO: 83552 - DNA, 20 bp, Artificial Sequence
  Description of Artificial Sequence: Synthetic oligonucleotide
  Target: SCNA; (+) strand; PAM type: YTN; PAM sequence: TTC
atagtgggtagagtagagaa

SEQ ID NO: 83553 - DNA, 20 bp, Artificial Sequence
  Description of Artificial Sequence: Synthetic oligonucleotide
  Target: SCNA; (+) strand; PAM type: YTN; PAM sequence: CTA
atgcatactgttgggagatc

SEQ ID NO: 83554 - DNA, 20 bp, Artificial Sequence
  Description of Artificial Sequence: Synthetic oligonucleotide
  Target: SCNA; (+) strand; PAM type: YTN; PAM sequence: CTG
ttgggagatcattatgtatg

SEQ ID NO: 83555 - DNA, 20 bp, Artificial Sequence
  Description of Artificial Sequence: Synthetic oligonucleotide
  Target: SCNA; (+) strand; PAM type: YTN; PAM sequence: TTG
ggagatcattatgtatgatt

SEQ ID NO: 83556 - DNA, 20 bp, Artificial Sequence
  Description of Artificial Sequence: Synthetic oligonucleotide
  Target: SCNA; (+) strand; PAM type: YTN; PAM sequence: TTA
tgtatgattttggaaagggg

SEQ ID NO: 83557 - DNA, 20 bp, Artificial Sequence
  Description of Artificial Sequence: Synthetic oligonucleotide
  Target: SCNA; (+) strand; PAM type: YTN; PAM sequence: TTT
tggaaagggggtgagcatga

SEQ ID NO: 83558 - DNA, 20 bp, Artificial Sequence
  Description of Artificial Sequence: Synthetic oligonucleotide
  Target: SCNA; (+) strand; PAM type: YTN; PAM sequence: TTT
ggaaagggggtgagcatgag

SEQ ID NO: 83559 - DNA, 20 bp, Artificial Sequence
  Description of Artificial Sequence: Synthetic oligonucleotide
  Target: SCNA; (+) strand; PAM type: YTN; PAM sequence: TTG
gaaagggggtgagcatgaga

SEQ ID NO: 83560 - DNA, 20 bp, Artificial Sequence
  Description of Artificial Sequence: Synthetic oligonucleotide
  Target: SCNA; (+) strand; PAM type: YTN; PAM sequence: TTA
ctctgaagaaatgggaagag

SEQ ID NO: 83561 - DNA, 20 bp, Artificial Sequence
  Description of Artificial Sequence: Synthetic oligonucleotide
  Target: SCNA; (+) strand; PAM type: YTN; PAM sequence: CTC
tgaagaaatgggaagagcaa

SEQ ID NO: 83562 - DNA, 20 bp, Artificial Sequence
  Description of Artificial Sequence: Synthetic oligonucleotide
  Target: SCNA; (+) strand; PAM type: YTN; PAM sequence: CTG
aagaaatgggaagagcaatc

SEQ ID NO: 83563 - DNA, 20 bp, Artificial Sequence
  Description of Artificial Sequence: Synthetic oligonucleotide
  Target: SCNA; (+) strand; PAM type: YTN; PAM sequence: TTC
agattctctaatttgacccc

SEQ ID NO: 83564 - DNA, 20 bp, Artificial Sequence
  Description of Artificial Sequence: Synthetic oligonucleotide
  Target: SCNA; (+) strand; PAM type: YTN; PAM sequence: TTC
tctaatttgaccccatggcc

SEQ ID NO: 83565 - DNA, 20 bp, Artificial Sequence
  Description of Artificial Sequence: Synthetic oligonucleotide
  Target: SCNA; (+) strand; PAM type: YTN; PAM sequence: CTC
taatttgaccccatggccaa

SEQ ID NO: 83566 - DNA, 20 bp, Artificial Sequence
  Description of Artificial Sequence: Synthetic oligonucleotide
  Target: SCNA; (+) strand; PAM type: YTN; PAM sequence: CTA
atttgaccccatggccaact

SEQ ID NO: 83567 - DNA, 20 bp, Artificial Sequence
  Description of Artificial Sequence: Synthetic oligonucleotide
  Target: SCNA; (+) strand; PAM type: YTN; PAM sequence: TTT
gaccccatggccaacttcat

SEQ ID NO: 83568 - DNA, 20 bp, Artificial Sequence
  Description of Artificial Sequence: Synthetic oligonucleotide
  Target: SCNA; (+) strand; PAM type: YTN; PAM sequence: TTG
accccatggccaacttcata

SEQ ID NO: 83569 - DNA, 20 bp, Artificial Sequence
  Description of Artificial Sequence: Synthetic oligonucleotide
  Target: SCNA; (+) strand; PAM type: YTN; PAM sequence: CTT
catattgtttccactagata

SEQ ID NO: 83570 - DNA, 20 bp, Artificial Sequence
  Description of Artificial Sequence: Synthetic oligonucleotide
  Target: SCNA; (+) strand; PAM type: YTN; PAM sequence: TTC
atattgtttccactagatat

SEQ ID NO: 83571 - DNA, 20 bp, Artificial Sequence
  Description of Artificial Sequence: Synthetic oligonucleotide
  Target: SCNA; (+) strand; PAM type: YTN; PAM sequence: TTG
tttccactagatatcatttt

SEQ ID NO: 83572 - DNA, 20 bp, Artificial Sequence
  Description of Artificial Sequence: Synthetic oligonucleotide
  Target: SCNA; (+) strand; PAM type: YTN; PAM sequence: TTT
ccactagatatcattttaaa

SEQ ID NO: 83573 - DNA, 20 bp, Artificial Sequence
  Description of Artificial Sequence: Synthetic oligonucleotide
  Target: SCNA; (+) strand; PAM type: YTN; PAM sequence: TTC
cactagatatcattttaaat

SEQ ID NO: 83574 - DNA, 20 bp, Artificial Sequence
  Description of Artificial Sequence: Synthetic oligonucleotide
  Target: SCNA; (+) strand; PAM type: YTN; PAM sequence: CTA
gatatcattttaaatattcc

SEQ ID NO: 83575 - DNA, 20 bp, Artificial Sequence
  Description of Artificial Sequence: Synthetic oligonucleotide
  Target: SCNA; (+) strand; PAM type: YTN; PAM sequence: TTT
taaatattcctgtggtttcg

SEQ ID NO: 83576 - DNA, 20 bp, Artificial Sequence
  Description of Artificial Sequence: Synthetic oligonucleotide
  Target: SCNA; (+) strand; PAM type: YTN; PAM sequence: TTT
aaatattcctgtggtttcgt

SEQ ID NO: 83577 - DNA, 20 bp, Artificial Sequence
  Description of Artificial Sequence: Synthetic oligonucleotide
  Target: SCNA; (+) strand; PAM type: YTN; PAM sequence: TTA
aatattcctgtggtttcgtg

SEQ ID NO: 83578 - DNA, 20 bp, Artificial Sequence
  Description of Artificial Sequence: Synthetic oligonucleotide
  Target: SCNA; (+) strand; PAM type: YTN; PAM sequence: TTC
ctgtggtttcgtggtcctaa

SEQ ID NO: 83579 - DNA, 20 bp, Artificial Sequence
  Description of Artificial Sequence: Synthetic oligonucleotide
  Target: SCNA; (+) strand; PAM type: YTN; PAM sequence: CTG
tggtttcgtggtcctaagaa

SEQ ID NO: 83580 - DNA, 20 bp, Artificial Sequence
  Description of Artificial Sequence: Synthetic oligonucleotide
  Target: SCNA; (+) strand; PAM type: YTN; PAM sequence: TTT
cgtggtcctaagaatatgaa

SEQ ID NO: 83581 - DNA, 20 bp, Artificial Sequence
  Description of Artificial Sequence: Synthetic oligonucleotide
  Target: SCNA; (+) strand; PAM type: YTN; PAM sequence: TTC
gtggtcctaagaatatgaag

SEQ ID NO: 83582 - DNA, 20 bp, Artificial Sequence
  Description of Artificial Sequence: Synthetic oligonucleotide
  Target: SCNA; (+) strand; PAM type: YTN; PAM sequence: CTA
agaatatgaaggcatgcaag

SEQ ID NO: 83583 - DNA, 20 bp, Artificial Sequence
  Description of Artificial Sequence: Synthetic oligonucleotide
  Target: SCNA; (+) strand; PAM type: YTN; PAM sequence: TTC
caagattaaagatgttaaag

SEQ ID NO: 83584 - DNA, 20 bp, Artificial Sequence
  Description of Artificial Sequence: Synthetic oligonucleotide
  Target: SCNA; (+) strand; PAM type: YTN; PAM sequence: TTA
aagatgttaaagccagatag

SEQ ID NO: 83585 - DNA, 20 bp, Artificial Sequence
  Description of Artificial Sequence: Synthetic oligonucleotide
  Target: SCNA; (+) strand; PAM type: YTN; PAM sequence: TTA
aagccagatagaaaagatat

SEQ ID NO: 83586 - DNA, 20 bp, Artificial Sequence
  Description of Artificial Sequence: Synthetic oligonucleotide
  Target: SCNA; (+) strand; PAM type: YTN; PAM sequence: TTT
aaatatttcaaaatctaaca

SEQ ID NO: 83587 - DNA, 20 bp, Artificial Sequence
  Description of Artificial Sequence: Synthetic oligonucleotide
  Target: SCNA; (+) strand; PAM type: YTN; PAM sequence: TTA
aatatttcaaaatctaacaa

SEQ ID NO: 83588 - DNA, 20 bp, Artificial Sequence
  Description of Artificial Sequence: Synthetic oligonucleotide
  Target: SCNA; (+) strand; PAM type: YTN; PAM sequence: TTT
caaaatctaacaagttcaaa

SEQ ID NO: 83589 - DNA, 20 bp, Artificial Sequence
  Description of Artificial Sequence: Synthetic oligonucleotide
  Target: SCNA; (+) strand; PAM type: YTN; PAM sequence: TTC
aaaatctaacaagttcaaat

SEQ ID NO: 83590 - DNA, 20 bp, Artificial Sequence
  Description of Artificial Sequence: Synthetic oligonucleotide
  Target: SCNA; (+) strand; PAM type: YTN; PAM sequence: CTA
acaagttcaaatgactttag

SEQ ID NO: 83591 - DNA, 20 bp, Artificial Sequence
  Description of Artificial Sequence: Synthetic oligonucleotide
  Target: SCNA; (+) strand; PAM type: YTN; PAM sequence: TTC
aaatgactttagttttagaa

SEQ ID NO: 83592 - DNA, 20 bp, Artificial Sequence
  Description of Artificial Sequence: Synthetic oligonucleotide
  Target: SCNA; (+) strand; PAM type: YTN; PAM sequence: CTT
tagttttagaaagaaaaaaa

SEQ ID NO: 83593 - DNA, 20 bp, Artificial Sequence
  Description of Artificial Sequence: Synthetic oligonucleotide
  Target: SCNA; (+) strand; PAM type: YTN; PAM sequence: TTT
agttttagaaagaaaaaaac

SEQ ID NO: 83594 - DNA, 20 bp, Artificial Sequence
  Description of Artificial Sequence: Synthetic oligonucleotide
  Target: SCNA; (+) strand; PAM type: YTN; PAM sequence: TTA
gttttagaaagaaaaaaaca

SEQ ID NO: 83595 - DNA, 20 bp, Artificial Sequence
  Description of Artificial Sequence: Synthetic oligonucleotide
  Target: SCNA; (+) strand; PAM type: YTN; PAM sequence: TTT
tagaaagaaaaaaacacatt

SEQ ID NO: 83596 - DNA, 20 bp, Artificial Sequence
  Description of Artificial Sequence: Synthetic oligonucleotide
  Target: SCNA; (+) strand; PAM type: YTN; PAM sequence: TTT
agaaagaaaaaaacacatta

SEQ ID NO: 83597 - DNA, 20 bp, Artificial Sequence
  Description of Artificial Sequence: Synthetic oligonucleotide
  Target: SCNA; (+) strand; PAM type: YTN; PAM sequence: TTA
gaaagaaaaaaacacattaa

SEQ ID NO: 83598 - DNA, 20 bp, Artificial Sequence
  Description of Artificial Sequence: Synthetic oligonucleotide
  Target: SCNA; (+) strand; PAM type: YTN; PAM sequence: TTA
atgagcccaagaaatacacg

SEQ ID NO: 83599 - DNA, 20 bp, Artificial Sequence
  Description of Artificial Sequence: Synthetic oligonucleotide
  Target: SCNA; (+) strand; PAM type: YTN; PAM sequence: CTC
tgcaactctggtgagcatga

SEQ ID NO: 83600 - DNA, 20 bp, Artificial Sequence
  Description of Artificial Sequence: Synthetic oligonucleotide
  Target: SCNA; (+) strand; PAM type: YTN; PAM sequence: CTG
caactctggtgagcatgata

SEQ ID NO: 83601 - DNA, 20 bp, Artificial Sequence
  Description of Artificial Sequence: Synthetic oligonucleotide
  Target: SCNA; (+) strand; PAM type: YTN; PAM sequence: CTC
tggtgagcatgatagacttc

SEQ ID NO: 83602 - DNA, 20 bp, Artificial Sequence
  Description of Artificial Sequence: Synthetic oligonucleotide
  Target: SCNA; (+) strand; PAM type: YTN; PAM sequence: CTG
gtgagcatgatagacttcta

SEQ ID NO: 83603 - DNA, 20 bp, Artificial Sequence
  Description of Artificial Sequence: Synthetic oligonucleotide
  Target: SCNA; (+) strand; PAM type: YTN; PAM sequence: CTT
ctaagagtaaatgtactaga

SEQ ID NO: 83604 - DNA, 20 bp, Artificial Sequence
  Description of Artificial Sequence: Synthetic oligonucleotide
  Target: SCNA; (+) strand; PAM type: YTN; PAM sequence: TTC
taagagtaaatgtactagat

SEQ ID NO: 83605 - DNA, 20 bp, Artificial Sequence
  Description of Artificial Sequence: Synthetic oligonucleotide
  Target: SCNA; (+) strand; PAM type: YTN; PAM sequence: CTA
agagtaaatgtactagatac

SEQ ID NO: 83606 - DNA, 20 bp, Artificial Sequence
  Description of Artificial Sequence: Synthetic oligonucleotide
  Target: SCNA; (+) strand; PAM type: YTN; PAM sequence: CTA
gatacaacctaaattcaggg

SEQ ID NO: 83607 - DNA, 20 bp, Artificial Sequence
  Description of Artificial Sequence: Synthetic oligonucleotide
  Target: SCNA; (+) strand; PAM type: YTN; PAM sequence: CTA
aattcagggacttattaaag

SEQ ID NO: 83608 - DNA, 20 bp, Artificial Sequence
  Description of Artificial Sequence: Synthetic oligonucleotide
  Target: SCNA; (+) strand; PAM type: YTN; PAM sequence: TTC
agggacttattaaagctcta

SEQ ID NO: 83609 - DNA, 20 bp, Artificial Sequence
  Description of Artificial Sequence: Synthetic oligonucleotide
  Target: SCNA; (+) strand; PAM type: YTN; PAM sequence: CTT
attaaagctctactactcat

SEQ ID NO: 83610 - DNA, 20 bp, Artificial Sequence
  Description of Artificial Sequence: Synthetic oligonucleotide
  Target: SCNA; (+) strand; PAM type: YTN; PAM sequence: TTA
ttaaagctctactactcatt

SEQ ID NO: 83611 - DNA, 20 bp, Artificial Sequence
  Description of Artificial Sequence: Synthetic oligonucleotide
  Target: SCNA; (+) strand; PAM type: YTN; PAM sequence: TTA
aagctctactactcattact

SEQ ID NO: 83612 - DNA, 20 bp, Artificial Sequence
  Description of Artificial Sequence: Synthetic oligonucleotide
  Target: SCNA; (+) strand; PAM type: YTN; PAM sequence: CTC
tactactcattactagtgac

SEQ ID NO: 83613 - DNA, 20 bp, Artificial Sequence
  Description of Artificial Sequence: Synthetic oligonucleotide
  Target: SCNA; (+) strand; PAM type: YTN; PAM sequence: CTA
ctactcattactagtgactc

SEQ ID NO: 83614 - DNA, 20 bp, Artificial Sequence
  Description of Artificial Sequence: Synthetic oligonucleotide
  Target: SCNA; (+) strand; PAM type: YTN; PAM sequence: CTA
ctcattactagtgactcaga

SEQ ID NO: 83615 - DNA, 20 bp, Artificial Sequence
  Description of Artificial Sequence: Synthetic oligonucleotide
  Target: SCNA; (+) strand; PAM type: YTN; PAM sequence: CTC
attactagtgactcagagca

SEQ ID NO: 83616 - DNA, 20 bp, Artificial Sequence
  Description of Artificial Sequence: Synthetic oligonucleotide
  Target: SCNA; (+) strand; PAM type: YTN; PAM sequence: TTA
ctagtgactcagagcaagta

SEQ ID NO: 83617 - DNA, 20 bp, Artificial Sequence
  Description of Artificial Sequence: Synthetic oligonucleotide
  Target: SCNA; (+) strand; PAM type: YTN; PAM sequence: CTA
gtgactcagagcaagtatct

SEQ ID NO: 83618 - DNA, 20 bp, Artificial Sequence
  Description of Artificial Sequence: Synthetic oligonucleotide
  Target: SCNA; (+) strand; PAM type: YTN; PAM sequence: CTC
agagcaagtatctataacct

SEQ ID NO: 83619 - DNA, 20 bp, Artificial Sequence
  Description of Artificial Sequence: Synthetic oligonucleotide
  Target: SCNA; (+) strand; PAM type: YTN; PAM sequence: CTA
taacctctctaatctctagt

SEQ ID NO: 83620 - DNA, 20 bp, Artificial Sequence
  Description of Artificial Sequence: Synthetic oligonucleotide
  Target: SCNA; (+) strand; PAM type: YTN; PAM sequence: CTC
tctaatctctagttttctca

SEQ ID NO: 83621 - DNA, 20 bp, Artificial Sequence
  Description of Artificial Sequence: Synthetic oligonucleotide
  Target: SCNA; (+) strand; PAM type: YTN; PAM sequence: CTC
taatctctagttttctcatt

SEQ ID NO: 83622 - DNA, 20 bp, Artificial Sequence
  Description of Artificial Sequence: Synthetic oligonucleotide
  Target: SCNA; (+) strand; PAM type: YTN; PAM sequence: CTA
atctctagttttctcattaa

SEQ ID NO: 83623 - DNA, 20 bp, Artificial Sequence
  Description of Artificial Sequence: Synthetic oligonucleotide
  Target: SCNA; (+) strand; PAM type: YTN; PAM sequence: CTC
tagttttctcattaaaaaat

SEQ ID NO: 83624 - DNA, 20 bp, Artificial Sequence
  Description of Artificial Sequence: Synthetic oligonucleotide
  Target: SCNA; (+) strand; PAM type: YTN; PAM sequence: CTA
gttttctcattaaaaaatgg

SEQ ID NO: 83625 - DNA, 20 bp, Artificial Sequence
  Description of Artificial Sequence: Synthetic oligonucleotide
  Target: SCNA; (+) strand; PAM type: YTN; PAM sequence: TTT
tctcattaaaaaatgggcat

SEQ ID NO: 83626 - DNA, 20 bp, Artificial Sequence
  Description of Artificial Sequence: Synthetic oligonucleotide
  Target: SCNA; (+) strand; PAM type: YTN; PAM sequence: TTT
ctcattaaaaaatgggcatg

SEQ ID NO: 83627 - DNA, 20 bp, Artificial Sequence
  Description of Artificial Sequence: Synthetic oligonucleotide
  Target: SCNA; (+) strand; PAM type: YTN; PAM sequence: TTC
tcattaaaaaatgggcatga

SEQ ID NO: 83628 - DNA, 20 bp, Artificial Sequence
  Description of Artificial Sequence: Synthetic oligonucleotide
  Target: SCNA; (+) strand; PAM type: YTN; PAM sequence: CTC
attaaaaaatgggcatgata

SEQ ID NO: 83629 - DNA, 20 bp, Artificial Sequence
  Description of Artificial Sequence: Synthetic oligonucleotide
  Target: SCNA; (+) strand; PAM type: YTN; PAM sequence: TTA
aaaaatgggcatgatatttt

SEQ ID NO: 83630 - DNA, 20 bp, Artificial Sequence
  Description of Artificial Sequence: Synthetic oligonucleotide
  Target: SCNA; (+) strand; PAM type: YTN; PAM sequence: TTT
tacttgtcttgtttgattgt

SEQ ID NO: 83631 - DNA, 20 bp, Artificial Sequence
  Description of Artificial Sequence: Synthetic oligonucleotide
  Target: SCNA; (+) strand; PAM type: YTN; PAM sequence: TTT
acttgtcttgtttgattgtt

SEQ ID NO: 83632 - DNA, 20 bp, Artificial Sequence
  Description of Artificial Sequence: Synthetic oligonucleotide
  Target: SCNA; (+) strand; PAM type: YTN; PAM sequence: TTA
cttgtcttgtttgattgttg

SEQ ID NO: 83633 - DNA, 20 bp, Artificial Sequence
  Description of Artificial Sequence: Synthetic oligonucleotide
  Target: SCNA; (+) strand; PAM type: YTN; PAM sequence: CTT
gtcttgtttgattgttgtaa

SEQ ID NO: 83634 - DNA, 20 bp, Artificial Sequence
  Description of Artificial Sequence: Synthetic oligonucleotide
  Target: SCNA; (+) strand; PAM type: YTN; PAM sequence: TTG
tcttgtttgattgttgtaag

SEQ ID NO: 83635 - DNA, 20 bp, Artificial Sequence
  Description of Artificial Sequence: Synthetic oligonucleotide
  Target: SCNA; (+) strand; PAM type: YTN; PAM sequence: CTT
gtttgattgttgtaaggaat

SEQ ID NO: 83636 - DNA, 20 bp, Artificial Sequence
  Description of Artificial Sequence: Synthetic oligonucleotide
  Target: SCNA; (+) strand; PAM type: YTN; PAM sequence: TTG
tttgattgttgtaaggaatg

SEQ ID NO: 83637 - DNA, 20 bp, Artificial Sequence
  Description of Artificial Sequence: Synthetic oligonucleotide
  Target: SCNA; (+) strand; PAM type: YTN; PAM sequence: TTT
gattgttgtaaggaatgaat

SEQ ID NO: 83638 - DNA, 20 bp, Artificial Sequence
  Description of Artificial Sequence: Synthetic oligonucleotide
  Target: SCNA; (+) strand; PAM type: YTN; PAM sequence: TTG
attgttgtaaggaatgaata

SEQ ID NO: 83639 - DNA, 20 bp, Artificial Sequence
  Description of Artificial Sequence: Synthetic oligonucleotide
  Target: SCNA; (+) strand; PAM type: YTN; PAM sequence: TTG
ttgtaaggaatgaataatgt

SEQ ID NO: 83640 - DNA, 20 bp, Artificial Sequence
  Description of Artificial Sequence: Synthetic oligonucleotide
  Target: SCNA; (+) strand; PAM type: YTN; PAM sequence: TTG
taaggaatgaataatgtggc

SEQ ID NO: 83641 - DNA, 20 bp, Artificial Sequence
  Description of Artificial Sequence: Synthetic oligonucleotide
  Target: SCNA; (+) strand; PAM type: YTN; PAM sequence: CTC
atagcaaagagccaggcaga

SEQ ID NO: 83642 - DNA, 20 bp, Artificial Sequence
  Description of Artificial Sequence: Synthetic oligonucleotide
  Target: SCNA; (+) strand; PAM type: YTN; PAM sequence: CTC
tcagtacaagtagctattgt

SEQ ID NO: 83643 - DNA, 20 bp, Artificial Sequence
  Description of Artificial Sequence: Synthetic oligonucleotide
  Target: SCNA; (+) strand; PAM type: YTN; PAM sequence: CTC
agtacaagtagctattgtta

SEQ ID NO: 83644 - DNA, 20 bp, Artificial Sequence
  Description of Artificial Sequence: Synthetic oligonucleotide
  Target: SCNA; (+) strand; PAM type: YTN; PAM sequence: CTA
ttgttattatctagcctcca

SEQ ID NO: 83645 - DNA, 20 bp, Artificial Sequence
  Description of Artificial Sequence: Synthetic oligonucleotide
  Target: SCNA; (+) strand; PAM type: YTN; PAM sequence: TTG
ttattatctagcctccatgt

SEQ ID NO: 83646 - DNA, 20 bp, Artificial Sequence
  Description of Artificial Sequence: Synthetic oligonucleotide
  Target: SCNA; (+) strand; PAM type: YTN; PAM sequence: TTA
ttatctagcctccatgtttt

SEQ ID NO: 83647 - DNA, 20 bp, Artificial Sequence
  Description of Artificial Sequence: Synthetic oligonucleotide
  Target: SCNA; (+) strand; PAM type: YTN; PAM sequence: TTA
tctagcctccatgttttggg

SEQ ID NO: 83648 - DNA, 20 bp, Artificial Sequence
  Description of Artificial Sequence: Synthetic oligonucleotide
  Target: SCNA; (+) strand; PAM type: YTN; PAM sequence: CTA
gcctccatgttttgggtgtc

SEQ ID NO: 83649 - DNA, 20 bp, Artificial Sequence
  Description of Artificial Sequence: Synthetic oligonucleotide
  Target: SCNA; (+) strand; PAM type: YTN; PAM sequence: CTC
catgttttgggtgtcctagg

SEQ ID NO: 83650 - DNA, 20 bp, Artificial Sequence
  Description of Artificial Sequence: Synthetic oligonucleotide
  Target: SCNA; (+) strand; PAM type: YTN; PAM sequence: TTT
tgggtgtcctaggacatgct

SEQ ID NO: 83651 - DNA, 20 bp, Artificial Sequence
  Description of Artificial Sequence: Synthetic oligonucleotide
  Target: SCNA; (+) strand; PAM type: YTN; PAM sequence: TTT
gggtgtcctaggacatgctt

SEQ ID NO: 83652 - DNA, 20 bp, Artificial Sequence
  Description of Artificial Sequence: Synthetic oligonucleotide
  Target: SCNA; (+) strand; PAM type: YTN; PAM sequence: TTG
ggtgtcctaggacatgcttt

SEQ ID NO: 83653 - DNA, 20 bp, Artificial Sequence
  Description of Artificial Sequence: Synthetic oligonucleotide
  Target: SCNA; (+) strand; PAM type: YTN; PAM sequence: CTA
ggacatgctttttttttttt

SEQ ID NO: 83654 - DNA, 20 bp, Artificial Sequence
  Description of Artificial Sequence: Synthetic oligonucleotide
  Target: SCNA; (+) strand; PAM type: YTN; PAM sequence: CTT
tttttttttttccattgcag

SEQ ID NO: 83655 - DNA, 20 bp, Artificial Sequence
  Description of Artificial Sequence: Synthetic oligonucleotide
  Target: SCNA; (+) strand; PAM type: YTN; PAM sequence: TTT
ttttttttttccattgcagt

SEQ ID NO: 83656 - DNA, 20 bp, Artificial Sequence
  Description of Artificial Sequence: Synthetic oligonucleotide
  Target: SCNA; (+) strand; PAM type: YTN; PAM sequence: TTT
tttttttttccattgcagta

SEQ ID NO: 83657 - DNA, 20 bp, Artificial Sequence
  Description of Artificial Sequence: Synthetic oligonucleotide
  Target: SCNA; (+) strand; PAM type: YTN; PAM sequence: TTT
ttttttttccattgcagtag

SEQ ID NO: 83658 - DNA, 20 bp, Artificial Sequence
  Description of Artificial Sequence: Synthetic oligonucleotide
  Target: SCNA; (+) strand; PAM type: YTN; PAM sequence: TTT
tttttttccattgcagtaga

SEQ ID NO: 83659 - DNA, 20 bp, Artificial Sequence
  Description of Artificial Sequence: Synthetic oligonucleotide
  Target: SCNA; (+) strand; PAM type: YTN; PAM sequence: TTT
ttttttccattgcagtagat

SEQ ID NO: 83660 - DNA, 20 bp, Artificial Sequence
  Description of Artificial Sequence: Synthetic oligonucleotide
  Target: SCNA; (+) strand; PAM type: YTN; PAM sequence: TTT
tttttccattgcagtagatt

SEQ ID NO: 83661 - DNA, 20 bp, Artificial Sequence
  Description of Artificial Sequence: Synthetic oligonucleotide
  Target: SCNA; (+) strand; PAM type: YTN; PAM sequence: TTT
ttttccattgcagtagattt

SEQ ID NO: 83662 - DNA, 20 bp, Artificial Sequence
  Description of Artificial Sequence: Synthetic oligonucleotide
  Target: SCNA; (+) strand; PAM type: YTN; PAM sequence: TTT
tttccattgcagtagatttc

SEQ ID NO: 83663 - DNA, 20 bp, Artificial Sequence
  Description of Artificial Sequence: Synthetic oligonucleotide
  Target: SCNA; (+) strand; PAM type: YTN; PAM sequence: TTT
ttccattgcagtagatttcc

SEQ ID NO: 83664 - DNA, 20 bp, Artificial Sequence
  Description of Artificial Sequence: Synthetic oligonucleotide
  Target: SCNA; (+) strand; PAM type: YTN; PAM sequence: TTT
tccattgcagtagatttcca

SEQ ID NO: 83665 - DNA, 20 bp, Artificial Sequence
  Description of Artificial Sequence: Synthetic oligonucleotide
  Target: SCNA; (+) strand; PAM type: YTN; PAM sequence: TTT
ccattgcagtagatttccac

SEQ ID NO: 83666 - DNA, 20 bp, Artificial Sequence
  Description of Artificial Sequence: Synthetic oligonucleotide
  Target: SCNA; (+) strand; PAM type: YTN; PAM sequence: TTC
cattgcagtagatttccacc

SEQ ID NO: 83667 - DNA, 20 bp, Artificial Sequence
  Description of Artificial Sequence: Synthetic oligonucleotide
  Target: SCNA; (+) strand; PAM type: YTN; PAM sequence: TTG
cagtagatttccacctgttc

SEQ ID NO: 83668 - DNA, 20 bp, Artificial Sequence
  Description of Artificial Sequence: Synthetic oligonucleotide
  Target: SCNA; (+) strand; PAM type: YTN; PAM sequence: TTT
ccacctgttcccatcctcca

SEQ ID NO: 83669 - DNA, 20 bp, Artificial Sequence
  Description of Artificial Sequence: Synthetic oligonucleotide
  Target: SCNA; (+) strand; PAM type: YTN; PAM sequence: TTC
cacctgttcccatcctccac

SEQ ID NO: 83670 - DNA, 20 bp, Artificial Sequence
  Description of Artificial Sequence: Synthetic oligonucleotide
  Target: SCNA; (+) strand; PAM type: YTN; PAM sequence: CTG
ttcccatcctccacagtctc

SEQ ID NO: 83671 - DNA, 20 bp, Artificial Sequence
  Description of Artificial Sequence: Synthetic oligonucleotide
  Target: SCNA; (+) strand; PAM type: YTN; PAM sequence: TTC
ccatcctccacagtctccca

SEQ ID NO: 83672 - DNA, 20 bp, Artificial Sequence
  Description of Artificial Sequence: Synthetic oligonucleotide
  Target: SCNA; (+) strand; PAM type: YTN; PAM sequence: CTC
cacagtctcccatcccacca

SEQ ID NO: 83673 - DNA, 20 bp, Artificial Sequence
  Description of Artificial Sequence: Synthetic oligonucleotide
  Target: SCNA; (+) strand; PAM type: YTN; PAM sequence: CTC
ccatcccaccagcaacacac

SEQ ID NO: 83674 - DNA, 20 bp, Artificial Sequence
  Description of Artificial Sequence: Synthetic oligonucleotide
  Target: SCNA; (+) strand; PAM type: YTN; PAM sequence: CTG
atgccttcccatcaataact

SEQ ID NO: 83675 - DNA, 20 bp, Artificial Sequence
  Description of Artificial Sequence: Synthetic oligonucleotide
  Target: SCNA; (+) strand; PAM type: YTN; PAM sequence: CTT
cccatcaataactctcactt

SEQ ID NO: 83676 - DNA, 20 bp, Artificial Sequence
  Description of Artificial Sequence: Synthetic oligonucleotide
  Target: SCNA; (+) strand; PAM type: YTN; PAM sequence: TTC
ccatcaataactctcactta

SEQ ID NO: 83677 - DNA, 20 bp, Artificial Sequence
  Description of Artificial Sequence: Synthetic oligonucleotide
  Target: SCNA; (+) strand; PAM type: YTN; PAM sequence: CTC
tcacttagtatgggtaagca

SEQ ID NO: 83678 - DNA, 20 bp, Artificial Sequence
  Description of Artificial Sequence: Synthetic oligonucleotide
  Target: SCNA; (+) strand; PAM type: YTN; PAM sequence: CTC
acttagtatgggtaagcaaa

SEQ ID NO: 83679 - DNA, 20 bp, Artificial Sequence
  Description of Artificial Sequence: Synthetic oligonucleotide
  Target: SCNA; (+) strand; PAM type: YTN; PAM sequence: CTT
agtatgggtaagcaaaaaat

SEQ ID NO: 83680 - DNA, 20 bp, Artificial Sequence
  Description of Artificial Sequence: Synthetic oligonucleotide
  Target: SCNA; (+) strand; PAM type: YTN; PAM sequence: TTA
gtatgggtaagcaaaaaatt

SEQ ID NO: 83681 - DNA, 20 bp, Artificial Sequence
  Description of Artificial Sequence: Synthetic oligonucleotide
  Target: SCNA; (+) strand; PAM type: YTN; PAM sequence: TTT
ccaaccagggatggaagttg

SEQ ID NO: 83682 - DNA, 20 bp, Artificial Sequence
  Description of Artificial Sequence: Synthetic oligonucleotide
  Target: SCNA; (+) strand; PAM type: YTN; PAM sequence: TTC
caaccagggatggaagttgt

SEQ ID NO: 83683 - DNA, 20 bp, Artificial Sequence
  Description of Artificial Sequence: Synthetic oligonucleotide
  Target: SCNA; (+) strand; PAM type: YTN; PAM sequence: TTG
tggagagatagagtgggaaa

SEQ ID NO: 83684 - DNA, 20 bp, Artificial Sequence
  Description of Artificial Sequence: Synthetic oligonucleotide
  Target: SCNA; (+) strand; PAM type: YTN; PAM sequence: CTC
aaggagcattgatagggatc

SEQ ID NO: 83685 - DNA, 20 bp, Artificial Sequence
  Description of Artificial Sequence: Synthetic oligonucleotide
  Target: SCNA; (+) strand; PAM type: YTN; PAM sequence: TTG
atagggatcattaattaaaa

SEQ ID NO: 83686 - DNA, 20 bp, Artificial Sequence
  Description of Artificial Sequence: Synthetic oligonucleotide
  Target: SCNA; (+) strand; PAM type: YTN; PAM sequence: TTA
attaaaaatctaccaaacat

SEQ ID NO: 83687 - DNA, 20 bp, Artificial Sequence
  Description of Artificial Sequence: Synthetic oligonucleotide
  Target: SCNA; (+) strand; PAM type: YTN; PAM sequence: TTA
aaaatctaccaaacatctct

SEQ ID NO: 83688 - DNA, 20 bp, Artificial Sequence
  Description of Artificial Sequence: Synthetic oligonucleotide
  Target: SCNA; (+) strand; PAM type: YTN; PAM sequence: CTA
ccaaacatctctttctctcc

SEQ ID NO: 83689 - DNA, 20 bp, Artificial Sequence
  Description of Artificial Sequence: Synthetic oligonucleotide
  Target: SCNA; (+) strand; PAM type: YTN; PAM sequence: CTC
tttctctccctaatgtgcga

SEQ ID NO: 83690 - DNA, 20 bp, Artificial Sequence
  Description of Artificial Sequence: Synthetic oligonucleotide
  Target: SCNA; (+) strand; PAM type: YTN; PAM sequence: CTT
tctctccctaatgtgcgagt

SEQ ID NO: 83691 - DNA, 20 bp, Artificial Sequence
  Description of Artificial Sequence: Synthetic oligonucleotide
  Target: SCNA; (+) strand; PAM type: YTN; PAM sequence: TTT
ctctccctaatgtgcgagtt

SEQ ID NO: 83692 - DNA, 20 bp, Artificial Sequence
  Description of Artificial Sequence: Synthetic oligonucleotide
  Target: SCNA; (+) strand; PAM type: YTN; PAM sequence: TTC
tctccctaatgtgcgagtta

SEQ ID NO: 83693 - DNA, 20 bp, Artificial Sequence
  Description of Artificial Sequence: Synthetic oligonucleotide
  Target: SCNA; (+) strand; PAM type: YTN; PAM sequence: CTC
tccctaatgtgcgagttaca

SEQ ID NO: 83694 - DNA, 20 bp, Artificial Sequence
  Description of Artificial Sequence: Synthetic oligonucleotide
  Target: SCNA; (+) strand; PAM type: YTN; PAM sequence: CTC
cctaatgtgcgagttacaat

SEQ ID NO: 83695 - DNA, 20 bp, Artificial Sequence
  Description of Artificial Sequence: Synthetic oligonucleotide
  Target: SCNA; (+) strand; PAM type: YTN; PAM sequence: CTA
atgtgcgagttacaataaca

SEQ ID NO: 83696 - DNA, 20 bp, Artificial Sequence
  Description of Artificial Sequence: Synthetic oligonucleotide
  Target: SCNA; (+) strand; PAM type: YTN; PAM sequence: TTA
caataacatcactcaaagca

SEQ ID NO: 83697 - DNA, 20 bp, Artificial Sequence
  Description of Artificial Sequence: Synthetic oligonucleotide
  Target: SCNA; (+) strand; PAM type: YTN; PAM sequence: CTC
aaagcagtttgcagccacag

SEQ ID NO: 83698 - DNA, 20 bp, Artificial Sequence
  Description of Artificial Sequence: Synthetic oligonucleotide
  Target: SCNA; (+) strand; PAM type: YTN; PAM sequence: TTT
gcagccacagcttgaagaaa

SEQ ID NO: 83699 - DNA, 20 bp, Artificial Sequence
  Description of Artificial Sequence: Synthetic oligonucleotide
  Target: SCNA; (+) strand; PAM type: YTN; PAM sequence: TTG
cagccacagcttgaagaaat

SEQ ID NO: 83700 - DNA, 20 bp, Artificial Sequence
  Description of Artificial Sequence: Synthetic oligonucleotide
  Target: SCNA; (+) strand; PAM type: YTN; PAM sequence: CTT
gaagaaatacagtaacaatg

SEQ ID NO: 83701 - DNA, 20 bp, Artificial Sequence
  Description of Artificial Sequence: Synthetic oligonucleotide
  Target: SCNA; (+) strand; PAM type: YTN; PAM sequence: TTG
aagaaatacagtaacaatga

SEQ ID NO: 83702 - DNA, 20 bp, Artificial Sequence
  Description of Artificial Sequence: Synthetic oligonucleotide
  Target: SCNA; (+) strand; PAM type: YTN; PAM sequence: TTA
acattcactatctttattaa

SEQ ID NO: 83703 - DNA, 20 bp, Artificial Sequence
  Description of Artificial Sequence: Synthetic oligonucleotide
  Target: SCNA; (+) strand; PAM type: YTN; PAM sequence: TTC
actatctttattaacatttt

SEQ ID NO: 83704 - DNA, 20 bp, Artificial Sequence
  Description of Artificial Sequence: Synthetic oligonucleotide
  Target: SCNA; (+) strand; PAM type: YTN; PAM sequence: CTA
tctttattaacatttttact

SEQ ID NO: 83705 - DNA, 20 bp, Artificial Sequence
  Description of Artificial Sequence: Synthetic oligonucleotide
  Target: SCNA; (+) strand; PAM type: YTN; PAM sequence: CTT
tattaacatttttactttct

SEQ ID NO: 83706 - DNA, 20 bp, Artificial Sequence
  Description of Artificial Sequence: Synthetic oligonucleotide
  Target: SCNA; (+) strand; PAM type: YTN; PAM sequence: TTT
attaacatttttactttctt

SEQ ID NO: 83707 - DNA, 20 bp, Artificial Sequence
  Description of Artificial Sequence: Synthetic oligonucleotide
  Target: SCNA; (+) strand; PAM type: YTN; PAM sequence: TTA
ttaacatttttactttctta

SEQ ID NO: 83708 - DNA, 20 bp, Artificial Sequence
  Description of Artificial Sequence: Synthetic oligonucleotide
  Target: SCNA; (+) strand; PAM type: YTN; PAM sequence: TTA
acatttttactttcttaaac

SEQ ID NO: 83709 - DNA, 20 bp, Artificial Sequence
  Description of Artificial Sequence: Synthetic oligonucleotide
  Target: SCNA; (+) strand; PAM type: YTN; PAM sequence: TTT
ttactttcttaaaccttgtt

SEQ ID NO: 83710 - DNA, 20 bp, Artificial Sequence
  Description of Artificial Sequence: Synthetic oligonucleotide
  Target: SCNA; (+) strand; PAM type: YTN; PAM sequence: TTT
tactttcttaaaccttgttt

SEQ ID NO: 83711 - DNA, 20 bp, Artificial Sequence
  Description of Artificial Sequence: Synthetic oligonucleotide
  Target: SCNA; (+) strand; PAM type: YTN; PAM sequence: TTT
actttcttaaaccttgtttc

SEQ ID NO: 83712 - DNA, 20 bp, Artificial Sequence
  Description of Artificial Sequence: Synthetic oligonucleotide
  Target: SCNA; (+) strand; PAM type: YTN; PAM sequence: TTA
ctttcttaaaccttgtttct

SEQ ID NO: 83713 - DNA, 20 bp, Artificial Sequence
  Description of Artificial Sequence: Synthetic oligonucleotide
  Target: SCNA; (+) strand; PAM type: YTN; PAM sequence: CTT
tcttaaaccttgtttctttc

SEQ ID NO: 83714 - DNA, 20 bp, Artificial Sequence
  Description of Artificial Sequence: Synthetic oligonucleotide
  Target: SCNA; (+) strand; PAM type: YTN; PAM sequence: TTT
cttaaaccttgtttctttca

SEQ ID NO: 83715 - DNA, 20 bp, Artificial Sequence
  Description of Artificial Sequence: Synthetic oligonucleotide
  Target: SCNA; (+) strand; PAM type: YTN; PAM sequence: TTC
ttaaaccttgtttctttcaa

SEQ ID NO: 83716 - DNA, 20 bp, Artificial Sequence
  Description of Artificial Sequence: Synthetic oligonucleotide
  Target: SCNA; (+) strand; PAM type: YTN; PAM sequence: CTT
aaaccttgtttctttcaaaa

SEQ ID NO: 83717 - DNA, 20 bp, Artificial Sequence
  Description of Artificial Sequence: Synthetic oligonucleotide
  Target: SCNA; (+) strand; PAM type: YTN; PAM sequence: TTA
aaccttgtttctttcaaaag

SEQ ID NO: 83718 - DNA, 20 bp, Artificial Sequence
  Description of Artificial Sequence: Synthetic oligonucleotide
  Target: SCNA; (+) strand; PAM type: YTN; PAM sequence: CTT
gtttctttcaaaagacactg

SEQ ID NO: 83719 - DNA, 20 bp, Artificial Sequence
  Description of Artificial Sequence: Synthetic oligonucleotide
  Target: SCNA; (+) strand; PAM type: YTN; PAM sequence: TTG
tttctttcaaaagacactgg

SEQ ID NO: 83720 - DNA, 20 bp, Artificial Sequence
  Description of Artificial Sequence: Synthetic oligonucleotide
  Target: SCNA; (+) strand; PAM type: YTN; PAM sequence: TTT
ctttcaaaagacactggcat

SEQ ID NO: 83721 - DNA, 20 bp, Artificial Sequence
  Description of Artificial Sequence: Synthetic oligonucleotide
  Target: SCNA; (+) strand; PAM type: YTN; PAM sequence: TTC
tttcaaaagacactggcata

SEQ ID NO: 83722 - DNA, 20 bp, Artificial Sequence
  Description of Artificial Sequence: Synthetic oligonucleotide
  Target: SCNA; (+) strand; PAM type: YTN; PAM sequence: CTT
tcaaaagacactggcatagt

SEQ ID NO: 83723 - DNA, 20 bp, Artificial Sequence
  Description of Artificial Sequence: Synthetic oligonucleotide
  Target: SCNA; (+) strand; PAM type: YTN; PAM sequence: TTT
caaaagacactggcatagtc

SEQ ID NO: 83724 - DNA, 20 bp, Artificial Sequence
  Description of Artificial Sequence: Synthetic oligonucleotide
  Target: SCNA; (+) strand; PAM type: YTN; PAM sequence: TTC
aaaagacactggcatagtcc

SEQ ID NO: 83725 - DNA, 20 bp, Artificial Sequence
  Description of Artificial Sequence: Synthetic oligonucleotide
  Target: SCNA; (+) strand; PAM type: YTN; PAM sequence: CTG
gcatagtcctgtatgaatta

SEQ ID NO: 83726 - DNA, 20 bp, Artificial Sequence
  Description of Artificial Sequence: Synthetic oligonucleotide
  Target: SCNA; (+) strand; PAM type: YTN; PAM sequence: CTG
tatgaattatgtggatttgc

SEQ ID NO: 83727 - DNA, 20 bp, Artificial Sequence
  Description of Artificial Sequence: Synthetic oligonucleotide
  Target: SCNA; (+) strand; PAM type: YTN; PAM sequence: TTA
tgtggatttgccaagagaaa

SEQ ID NO: 83728 - DNA, 20 bp, Artificial Sequence
  Description of Artificial Sequence: Synthetic oligonucleotide
  Target: SCNA; (+) strand; PAM type: YTN; PAM sequence: TTT
gccaagagaaaaaaataaaa

SEQ ID NO: 83729 - DNA, 20 bp, Artificial Sequence
  Description of Artificial Sequence: Synthetic oligonucleotide
  Target: SCNA; (+) strand; PAM type: YTN; PAM sequence: TTG
ccaagagaaaaaaataaaat

SEQ ID NO: 83730 - DNA, 20 bp, Artificial Sequence
  Description of Artificial Sequence: Synthetic oligonucleotide
  Target: SCNA; (+) strand; PAM type: YTN; PAM sequence: TTC
caagtttgacagaccctttg

SEQ ID NO: 83731 - DNA, 20 bp, Artificial Sequence
  Description of Artificial Sequence: Synthetic oligonucleotide
  Target: SCNA; (+) strand; PAM type: YTN; PAM sequence: TTT
gacagaccctttgtgccagt

SEQ ID NO: 83732 - DNA, 20 bp, Artificial Sequence
  Description of Artificial Sequence: Synthetic oligonucleotide
  Target: SCNA; (+) strand; PAM type: YTN; PAM sequence: TTG
acagaccctttgtgccagtg

SEQ ID NO: 83733 - DNA, 20 bp, Artificial Sequence
  Description of Artificial Sequence: Synthetic oligonucleotide
  Target: SCNA; (+) strand; PAM type: YTN; PAM sequence: CTT
tgtgccagtggctctgaaag

SEQ ID NO: 83734 - DNA, 20 bp, Artificial Sequence
  Description of Artificial Sequence: Synthetic oligonucleotide
  Target: SCNA; (+) strand; PAM type: YTN; PAM sequence: TTT
gtgccagtggctctgaaagg

SEQ ID NO: 83735 - DNA, 20 bp, Artificial Sequence
  Description of Artificial Sequence: Synthetic oligonucleotide
  Target: SCNA; (+) strand; PAM type: YTN; PAM sequence: TTG
tgccagtggctctgaaaggc

SEQ ID NO: 83736 - DNA, 20 bp, Artificial Sequence
  Description of Artificial Sequence: Synthetic oligonucleotide
  Target: SCNA; (+) strand; PAM type: YTN; PAM sequence: CTC
tgaaaggcttcagaatgaat

SEQ ID NO: 83737 - DNA, 20 bp, Artificial Sequence
  Description of Artificial Sequence: Synthetic oligonucleotide
  Target: SCNA; (+) strand; PAM type: YTN; PAM sequence: CTG
aaaggcttcagaatgaatat

SEQ ID NO: 83738 - DNA, 20 bp, Artificial Sequence
  Description of Artificial Sequence: Synthetic oligonucleotide
  Target: SCNA; (+) strand; PAM type: YTN; PAM sequence: CTT
cagaatgaatatccaattca

SEQ ID NO: 83739 - DNA, 20 bp, Artificial Sequence
  Description of Artificial Sequence: Synthetic oligonucleotide
  Target: SCNA; (+) strand; PAM type: YTN; PAM sequence: TTC
agaatgaatatccaattcag

SEQ ID NO: 83740 - DNA, 20 bp, Artificial Sequence
  Description of Artificial Sequence: Synthetic oligonucleotide
  Target: SCNA; (+) strand; PAM type: YTN; PAM sequence: TTC
agaaatcagtccctaatatt

SEQ ID NO: 83741 - DNA, 20 bp, Artificial Sequence
  Description of Artificial Sequence: Synthetic oligonucleotide
  Target: SCNA; (+) strand; PAM type: YTN; PAM sequence: CTA
atatttcagattagtgaaga

SEQ ID NO: 83742 - DNA, 20 bp, Artificial Sequence
  Description of Artificial Sequence: Synthetic oligonucleotide
  Target: SCNA; (+) strand; PAM type: YTN; PAM sequence: TTT
cagattagtgaagaatcaac

SEQ ID NO: 83743 - DNA, 20 bp, Artificial Sequence
  Description of Artificial Sequence: Synthetic oligonucleotide
  Target: SCNA; (+) strand; PAM type: YTN; PAM sequence: TTC
agattagtgaagaatcaaca

SEQ ID NO: 83744 - DNA, 20 bp, Artificial Sequence
  Description of Artificial Sequence: Synthetic oligonucleotide
  Target: SCNA; (+) strand; PAM type: YTN; PAM sequence: TTA
gtgaagaatcaacagactga

SEQ ID NO: 83745 - DNA, 20 bp, Artificial Sequence
  Description of Artificial Sequence: Synthetic oligonucleotide
  Target: SCNA; (+) strand; PAM type: YTN; PAM sequence: CTG
aacagcatttgtattcagaa

SEQ ID NO: 83746 - DNA, 20 bp, Artificial Sequence
  Description of Artificial Sequence: Synthetic oligonucleotide
  Target: SCNA; (+) strand; PAM type: YTN; PAM sequence: TTT
gtattcagaaaggaagaaaa

SEQ ID NO: 83747 - DNA, 20 bp, Artificial Sequence
  Description of Artificial Sequence: Synthetic oligonucleotide
  Target: SCNA; (+) strand; PAM type: YTN; PAM sequence: TTG
tattcagaaaggaagaaaat

SEQ ID NO: 83748 - DNA, 20 bp, Artificial Sequence
  Description of Artificial Sequence: Synthetic oligonucleotide
  Target: SCNA; (+) strand; PAM type: YTN; PAM sequence: TTC
agaaaggaagaaaataaatg

SEQ ID NO: 83749 - DNA, 20 bp, Artificial Sequence
  Description of Artificial Sequence: Synthetic oligonucleotide
  Target: SCNA; (+) strand; PAM type: YTN; PAM sequence: TTT
ttaaaatatcacgggaactt

SEQ ID NO: 83750 - DNA, 20 bp, Artificial Sequence
  Description of Artificial Sequence: Synthetic oligonucleotide
  Target: SCNA; (+) strand; PAM type: YTN; PAM sequence: TTT
taaaatatcacgggaacttg

SEQ ID NO: 83751 - DNA, 20 bp, Artificial Sequence
  Description of Artificial Sequence: Synthetic oligonucleotide
  Target: SCNA; (+) strand; PAM type: YTN; PAM sequence: TTT
aaaatatcacgggaacttgt

SEQ ID NO: 83752 - DNA, 20 bp, Artificial Sequence
  Description of Artificial Sequence: Synthetic oligonucleotide
  Target: SCNA; (+) strand; PAM type: YTN; PAM sequence: TTA
aaatatcacgggaacttgta

SEQ ID NO: 83753 - DNA, 20 bp, Artificial Sequence
  Description of Artificial Sequence: Synthetic oligonucleotide
  Target: SCNA; (+) strand; PAM type: YTN; PAM sequence: CTT
gtaatgttttgtgtattgtt

SEQ ID NO: 83754 - DNA, 20 bp, Artificial Sequence
  Description of Artificial Sequence: Synthetic oligonucleotide
  Target: SCNA; (+) strand; PAM type: YTN; PAM sequence: TTG
taatgttttgtgtattgttt

SEQ ID NO: 83755 - DNA, 20 bp, Artificial Sequence
  Description of Artificial Sequence: Synthetic oligonucleotide
  Target: SCNA; (+) strand; PAM type: YTN; PAM sequence: TTT
tgtgtattgttttgaactga

SEQ ID NO: 83756 - DNA, 20 bp, Artificial Sequence
  Description of Artificial Sequence: Synthetic oligonucleotide
  Target: SCNA; (+) strand; PAM type: YTN; PAM sequence: TTT
gtgtattgttttgaactgaa

SEQ ID NO: 83757 - DNA, 20 bp, Artificial Sequence
  Description of Artificial Sequence: Synthetic oligonucleotide
  Target: SCNA; (+) strand; PAM type: YTN; PAM sequence: TTG
tgtattgttttgaactgaag

SEQ ID NO: 83758 - DNA, 20 bp, Artificial Sequence
  Description of Artificial Sequence: Synthetic oligonucleotide
  Target: SCNA; (+) strand; PAM type: YTN; PAM sequence: TTG
ttttgaactgaagttacaat

SEQ ID NO: 83759 - DNA, 20 bp, Artificial Sequence
  Description of Artificial Sequence: Synthetic oligonucleotide
  Target: SCNA; (+) strand; PAM type: YTN; PAM sequence: TTT
tgaactgaagttacaatact

SEQ ID NO: 83760 - DNA, 20 bp, Artificial Sequence
  Description of Artificial Sequence: Synthetic oligonucleotide
  Target: SCNA; (+) strand; PAM type: YTN; PAM sequence: TTT
gaactgaagttacaatactg

SEQ ID NO: 83761 - DNA, 20 bp, Artificial Sequence
  Description of Artificial Sequence: Synthetic oligonucleotide
  Target: SCNA; (+) strand; PAM type: YTN; PAM sequence: TTG
aactgaagttacaatactgt

SEQ ID NO: 83762 - DNA, 20 bp, Artificial Sequence
  Description of Artificial Sequence: Synthetic oligonucleotide
  Target: SCNA; (+) strand; PAM type: YTN; PAM sequence: CTG
aagttacaatactgttacaa

SEQ ID NO: 83763 - DNA, 20 bp, Artificial Sequence
  Description of Artificial Sequence: Synthetic oligonucleotide
  Target: SCNA; (+) strand; PAM type: YTN; PAM sequence: TTA
caatactgttacaaacagag

SEQ ID NO: 83764 - DNA, 20 bp, Artificial Sequence
  Description of Artificial Sequence: Synthetic oligonucleotide
  Target: SCNA; (+) strand; PAM type: YTN; PAM sequence: CTG
ttacaaacagagtatataca

SEQ ID NO: 83765 - DNA, 20 bp, Artificial Sequence
  Description of Artificial Sequence: Synthetic oligonucleotide
  Target: SCNA; (+) strand; PAM type: YTN; PAM sequence: TTA
caaacagagtatatacagca

SEQ ID NO: 83766 - DNA, 20 bp, Artificial Sequence
  Description of Artificial Sequence: Synthetic oligonucleotide
  Target: SCNA; (+) strand; PAM type: YTN; PAM sequence: TTC
cttacaatatccaaaatatc

SEQ ID NO: 83767 - DNA, 20 bp, Artificial Sequence
  Description of Artificial Sequence: Synthetic oligonucleotide
  Target: SCNA; (+) strand; PAM type: YTN; PAM sequence: CTT
acaatatccaaaatatccag

SEQ ID NO: 83768 - DNA, 20 bp, Artificial Sequence
  Description of Artificial Sequence: Synthetic oligonucleotide
  Target: SCNA; (+) strand; PAM type: YTN; PAM sequence: TTA
caatatccaaaatatccagg

SEQ ID NO: 83769 - DNA, 20 bp, Artificial Sequence
  Description of Artificial Sequence: Synthetic oligonucleotide
  Target: SCNA; (+) strand; PAM type: YTN; PAM sequence: CTA
atacgttttcctttctagat

SEQ ID NO: 83770 - DNA, 20 bp, Artificial Sequence
  Description of Artificial Sequence: Synthetic oligonucleotide
  Target: SCNA; (+) strand; PAM type: YTN; PAM sequence: TTT
tcctttctagataatttgag

SEQ ID NO: 83771 - DNA, 20 bp, Artificial Sequence
  Description of Artificial Sequence: Synthetic oligonucleotide
  Target: SCNA; (+) strand; PAM type: YTN; PAM sequence: TTT
cctttctagataatttgaga

SEQ ID NO: 83772 - DNA, 20 bp, Artificial Sequence
  Description of Artificial Sequence: Synthetic oligonucleotide
  Target: SCNA; (+) strand; PAM type: YTN; PAM sequence: TTC
ctttctagataatttgagag

SEQ ID NO: 83773 - DNA, 20 bp, Artificial Sequence
  Description of Artificial Sequence: Synthetic oligonucleotide
  Target: SCNA; (+) strand; PAM type: YTN; PAM sequence: CTT
tctagataatttgagagtat

SEQ ID NO: 83774 - DNA, 20 bp, Artificial Sequence
  Description of Artificial Sequence: Synthetic oligonucleotide
  Target: SCNA; (+) strand; PAM type: YTN; PAM sequence: TTT
ctagataatttgagagtata

SEQ ID NO: 83775 - DNA, 20 bp, Artificial Sequence
  Description of Artificial Sequence: Synthetic oligonucleotide
  Target: SCNA; (+) strand; PAM type: YTN; PAM sequence: TTC
tagataatttgagagtataa

SEQ ID NO: 83776 - DNA, 20 bp, Artificial Sequence
  Description of Artificial Sequence: Synthetic oligonucleotide
  Target: SCNA; (+) strand; PAM type: YTN; PAM sequence: CTA
gataatttgagagtataaag

SEQ ID NO: 83777 - DNA, 20 bp, Artificial Sequence
  Description of Artificial Sequence: Synthetic oligonucleotide
  Target: SCNA; (+) strand; PAM type: YTN; PAM sequence: TTT
gagagtataaagtgacgttt

SEQ ID NO: 83778 - DNA, 20 bp, Artificial Sequence
  Description of Artificial Sequence: Synthetic oligonucleotide
  Target: SCNA; (+) strand; PAM type: YTN; PAM sequence: TTG
agagtataaagtgacgttta

SEQ ID NO: 83779 - DNA, 20 bp, Artificial Sequence
  Description of Artificial Sequence: Synthetic oligonucleotide
  Target: SCNA; (+) strand; PAM type: YTN; PAM sequence: TTT
aagaaactttttaggtcggg

SEQ ID NO: 83780 - DNA, 20 bp, Artificial Sequence
  Description of Artificial Sequence: Synthetic oligonucleotide
  Target: SCNA; (+) strand; PAM type: YTN; PAM sequence: TTA
agaaactttttaggtcgggc

SEQ ID NO: 83781 - DNA, 20 bp, Artificial Sequence
  Description of Artificial Sequence: Synthetic oligonucleotide
  Target: SCNA; (+) strand; PAM type: YTN; PAM sequence: CTT
tttaggtcgggcatggtggc

SEQ ID NO: 83782 - DNA, 20 bp, Artificial Sequence
  Description of Artificial Sequence: Synthetic oligonucleotide
  Target: SCNA; (+) strand; PAM type: YTN; PAM sequence: TTT
ttaggtcgggcatggtggct

SEQ ID NO: 83783 - DNA, 20 bp, Artificial Sequence
  Description of Artificial Sequence: Synthetic oligonucleotide
  Target: SCNA; (+) strand; PAM type: YTN; PAM sequence: TTT
taggtcgggcatggtggctc

SEQ ID NO: 83784 - DNA, 20 bp, Artificial Sequence
  Description of Artificial Sequence: Synthetic oligonucleotide
  Target: SCNA; (+) strand; PAM type: YTN; PAM sequence: TTT
aggtcgggcatggtggctca

SEQ ID NO: 83785 - DNA, 20 bp, Artificial Sequence
  Description of Artificial Sequence: Synthetic oligonucleotide
  Target: SCNA; (+) strand; PAM type: YTN; PAM sequence: TTA
ggtcgggcatggtggctcac

SEQ ID NO: 83786 - DNA, 20 bp, Artificial Sequence
  Description of Artificial Sequence: Synthetic oligonucleotide
  Target: SCNA; (+) strand; PAM type: YTN; PAM sequence: CTC
acgcctgtaatctcagcact

SEQ ID NO: 83787 - DNA, 20 bp, Artificial Sequence
  Description of Artificial Sequence: Synthetic oligonucleotide
  Target: SCNA; (+) strand; PAM type: YTN; PAM sequence: CTG
taatctcagcactttgggag

SEQ ID NO: 83788 - DNA, 20 bp, Artificial Sequence
  Description of Artificial Sequence: Synthetic oligonucleotide
  Target: SCNA; (+) strand; PAM type: YTN; PAM sequence: CTC
agcactttgggaggctgagg

SEQ ID NO: 83789 - DNA, 20 bp, Artificial Sequence
  Description of Artificial Sequence: Synthetic oligonucleotide
  Target: SCNA; (+) strand; PAM type: YTN; PAM sequence: CTT
tgggaggctgaggtgggcag

SEQ ID NO: 83790 - DNA, 20 bp, Artificial Sequence
  Description of Artificial Sequence: Synthetic oligonucleotide
  Target: SCNA; (+) strand; PAM type: YTN; PAM sequence: TTT
gggaggctgaggtgggcaga

SEQ ID NO: 83791 - DNA, 20 bp, Artificial Sequence
  Description of Artificial Sequence: Synthetic oligonucleotide
  Target: SCNA; (+) strand; PAM type: YTN; PAM sequence: TTG
ggaggctgaggtgggcagat

SEQ ID NO: 83792 - DNA, 20 bp, Artificial Sequence
  Description of Artificial Sequence: Synthetic oligonucleotide
  Target: SCNA; (+) strand; PAM type: YTN; PAM sequence: CTG
aggtgggcagattacctgag

SEQ ID NO: 83793 - DNA, 20 bp, Artificial Sequence
  Description of Artificial Sequence: Synthetic oligonucleotide
  Target: SCNA; (+) strand; PAM type: YTN; PAM sequence: TTA
cctgaggtcaggagttagag

SEQ ID NO: 83794 - DNA, 20 bp, Artificial Sequence
  Description of Artificial Sequence: Synthetic oligonucleotide
  Target: SCNA; (+) strand; PAM type: YTN; PAM sequence: CTG
aggtcaggagttagagacca

SEQ ID NO: 83795 - DNA, 20 bp, Artificial Sequence
  Description of Artificial Sequence: Synthetic oligonucleotide
  Target: SCNA; (+) strand; PAM type: YTN; PAM sequence: TTA
gagaccagcctggccaagat

SEQ ID NO: 83796 - DNA, 20 bp, Artificial Sequence
  Description of Artificial Sequence: Synthetic oligonucleotide
  Target: SCNA; (+) strand; PAM type: YTN; PAM sequence: CTG
gccaagatggtaaaaccccg

SEQ ID NO: 83797 - DNA, 20 bp, Artificial Sequence
  Description of Artificial Sequence: Synthetic oligonucleotide
  Target: SCNA; (+) strand; PAM type: YTN; PAM sequence: CTC
tactaaaaatacaaaaatca

SEQ ID NO: 83798 - DNA, 20 bp, Artificial Sequence
  Description of Artificial Sequence: Synthetic oligonucleotide
  Target: SCNA; (+) strand; PAM type: YTN; PAM sequence: CTA
ctaaaaatacaaaaatcagc

SEQ ID NO: 83799 - DNA, 20 bp, Artificial Sequence
  Description of Artificial Sequence: Synthetic oligonucleotide
  Target: SCNA; (+) strand; PAM type: YTN; PAM sequence: CTA
aaaatacaaaaatcagctgg

SEQ ID NO: 83800 - DNA, 20 bp, Artificial Sequence
  Description of Artificial Sequence: Synthetic oligonucleotide
  Target: SCNA; (+) strand; PAM type: YTN; PAM sequence: CTG
gacgtggtggcaggtgcctg

SEQ ID NO: 83801 - DNA, 20 bp, Artificial Sequence
  Description of Artificial Sequence: Synthetic oligonucleotide
  Target: SCNA; (+) strand; PAM type: YTN; PAM sequence: CTG
taatcccagctacttggggg

SEQ ID NO: 83802 - DNA, 20 bp, Artificial Sequence
  Description of Artificial Sequence: Synthetic oligonucleotide
  Target: SCNA; (+) strand; PAM type: YTN; PAM sequence: CTA
cttggggggctgaggcagga

SEQ ID NO: 83803 - DNA, 20 bp, Artificial Sequence
  Description of Artificial Sequence: Synthetic oligonucleotide
  Target: SCNA; (+) strand; PAM type: YTN; PAM sequence: CTT
ggggggctgaggcaggagaa

SEQ ID NO: 83804 - DNA, 20 bp, Artificial Sequence
  Description of Artificial Sequence: Synthetic oligonucleotide
  Target: SCNA; (+) strand; PAM type: YTN; PAM sequence: TTG
gggggctgaggcaggagaat

SEQ ID NO: 83805 - DNA, 20 bp, Artificial Sequence
  Description of Artificial Sequence: Synthetic oligonucleotide
  Target: SCNA; (+) strand; PAM type: YTN; PAM sequence: CTG
aggcaggagaattgcttgta

SEQ ID NO: 83806 - DNA, 20 bp, Artificial Sequence
  Description of Artificial Sequence: Synthetic oligonucleotide
  Target: SCNA; (+) strand; PAM type: YTN; PAM sequence: TTG
cttgtacccaggaggtggtt

SEQ ID NO: 83807 - DNA, 20 bp, Artificial Sequence
  Description of Artificial Sequence: Synthetic oligonucleotide
  Target: SCNA; (+) strand; PAM type: YTN; PAM sequence: CTT
gtacccaggaggtggttgtt

SEQ ID NO: 83808 - DNA, 20 bp, Artificial Sequence
  Description of Artificial Sequence: Synthetic oligonucleotide
  Target: SCNA; (+) strand; PAM type: YTN; PAM sequence: TTG
tacccaggaggtggttgttg

SEQ ID NO: 83809 - DNA, 20 bp, Artificial Sequence
  Description of Artificial Sequence: Synthetic oligonucleotide
  Target: SCNA; (+) strand; PAM type: YTN; PAM sequence: TTG
ttgcactgagccgagatcgc

SEQ ID NO: 83810 - DNA, 20 bp, Artificial Sequence
  Description of Artificial Sequence: Synthetic oligonucleotide
  Target: SCNA; (+) strand; PAM type: YTN; PAM sequence: TTG
cactgagccgagatcgcact

SEQ ID NO: 83811 - DNA, 20 bp, Artificial Sequence
  Description of Artificial Sequence: Synthetic oligonucleotide
  Target: SCNA; (+) strand; PAM type: YTN; PAM sequence: CTG
agccgagatcgcactactgc

SEQ ID NO: 83812 - DNA, 20 bp, Artificial Sequence
  Description of Artificial Sequence: Synthetic oligonucleotide
  Target: SCNA; (+) strand; PAM type: YTN; PAM sequence: CTA
ctgcgctccagcctgggcga

SEQ ID NO: 83813 - DNA, 20 bp, Artificial Sequence
  Description of Artificial Sequence: Synthetic oligonucleotide
  Target: SCNA; (+) strand; PAM type: YTN; PAM sequence: CTG
cgctccagcctgggcgacag

SEQ ID NO: 83814 - DNA, 20 bp, Artificial Sequence
  Description of Artificial Sequence: Synthetic oligonucleotide
  Target: SCNA; (+) strand; PAM type: YTN; PAM sequence: CTC
cagcctgggcgacagagcaa

SEQ ID NO: 83815 - DNA, 20 bp, Artificial Sequence
  Description of Artificial Sequence: Synthetic oligonucleotide
  Target: SCNA; (+) strand; PAM type: YTN; PAM sequence: CTG
ggcgacagagcaagactcca

SEQ ID NO: 83816 - DNA, 20 bp, Artificial Sequence
  Description of Artificial Sequence: Synthetic oligonucleotide
  Target: SCNA; (+) strand; PAM type: YTN; PAM sequence: CTC
catcttgggggaaaaagaaa

SEQ ID NO: 83817 - DNA, 20 bp, Artificial Sequence
  Description of Artificial Sequence: Synthetic oligonucleotide
  Target: SCNA; (+) strand; PAM type: YTN; PAM sequence: CTT
gggggaaaaagaaaaaagaa

SEQ ID NO: 83818 - DNA, 20 bp, Artificial Sequence
  Description of Artificial Sequence: Synthetic oligonucleotide
  Target: SCNA; (+) strand; PAM type: YTN; PAM sequence: TTG
ggggaaaaagaaaaaagaaa

SEQ ID NO: 83819 - DNA, 20 bp, Artificial Sequence
  Description of Artificial Sequence: Synthetic oligonucleotide
  Target: SCNA; (+) strand; PAM type: YTN; PAM sequence: CTT
tttaacaccatataaaaagc

SEQ ID NO: 83820 - DNA, 20 bp, Artificial Sequence
  Description of Artificial Sequence: Synthetic oligonucleotide
  Target: SCNA; (+) strand; PAM type: YTN; PAM sequence: TTT
ttaacaccatataaaaagca

SEQ ID NO: 83821 - DNA, 20 bp, Artificial Sequence
  Description of Artificial Sequence: Synthetic oligonucleotide
  Target: SCNA; (+) strand; PAM type: YTN; PAM sequence: TTT
taacaccatataaaaagcac

SEQ ID NO: 83822 - DNA, 20 bp, Artificial Sequence
  Description of Artificial Sequence: Synthetic oligonucleotide
  Target: SCNA; (+) strand; PAM type: YTN; PAM sequence: TTT
aacaccatataaaaagcaca

SEQ ID NO: 83823 - DNA, 20 bp, Artificial Sequence
  Description of Artificial Sequence: Synthetic oligonucleotide
  Target: SCNA; (+) strand; PAM type: YTN; PAM sequence: TTA
acaccatataaaaagcacat

SEQ ID NO: 83824 - DNA, 20 bp, Artificial Sequence
  Description of Artificial Sequence: Synthetic oligonucleotide
  Target: SCNA; (+) strand; PAM type: YTN; PAM sequence: CTA
atggtttgaaaacttggtgt

SEQ ID NO: 83825 - DNA, 20 bp, Artificial Sequence
  Description of Artificial Sequence: Synthetic oligonucleotide
  Target: SCNA; (+) strand; PAM type: YTN; PAM sequence: TTT
gaaaacttggtgttccatat

SEQ ID NO: 83826 - DNA, 20 bp, Artificial Sequence
  Description of Artificial Sequence: Synthetic oligonucleotide
  Target: SCNA; (+) strand; PAM type: YTN; PAM sequence: TTG
aaaacttggtgttccatata

SEQ ID NO: 83827 - DNA, 20 bp, Artificial Sequence
  Description of Artificial Sequence: Synthetic oligonucleotide
  Target: SCNA; (+) strand; PAM type: YTN; PAM sequence: CTT
ggtgttccatataaagctgg

SEQ ID NO: 83828 - DNA, 20 bp, Artificial Sequence
  Description of Artificial Sequence: Synthetic oligonucleotide
  Target: SCNA; (+) strand; PAM type: YTN; PAM sequence: TTG
gtgttccatataaagctgga

SEQ ID NO: 83829 - DNA, 20 bp, Artificial Sequence
  Description of Artificial Sequence: Synthetic oligonucleotide
  Target: SCNA; (+) strand; PAM type: YTN; PAM sequence: TTC
catataaagctggaaattta

SEQ ID NO: 83830 - DNA, 20 bp, Artificial Sequence
  Description of Artificial Sequence: Synthetic oligonucleotide
  Target: SCNA; (+) strand; PAM type: YTN; PAM sequence: CTG
gaaatttatgtagttaagaa

SEQ ID NO: 83831 - DNA, 20 bp, Artificial Sequence
  Description of Artificial Sequence: Synthetic oligonucleotide
  Target: SCNA; (+) strand; PAM type: YTN; PAM sequence: TTT
atgtagttaagaaatttaga

SEQ ID NO: 83832 - DNA, 20 bp, Artificial Sequence
  Description of Artificial Sequence: Synthetic oligonucleotide
  Target: SCNA; (+) strand; PAM type: YTN; PAM sequence: TTA
tgtagttaagaaatttagaa

SEQ ID NO: 83833 - DNA, 20 bp, Artificial Sequence
  Description of Artificial Sequence: Synthetic oligonucleotide
  Target: SCNA; (+) strand; PAM type: YTN; PAM sequence: TTA
agaaatttagaaagcaaatt

SEQ ID NO: 83834 - DNA, 20 bp, Artificial Sequence
  Description of Artificial Sequence: Synthetic oligonucleotide
  Target: SCNA; (+) strand; PAM type: YTN; PAM sequence: TTT
agaaagcaaattattcaaag

SEQ ID NO: 83835 - DNA, 20 bp, Artificial Sequence
  Description of Artificial Sequence: Synthetic oligonucleotide
  Target: SCNA; (+) strand; PAM type: YTN; PAM sequence: TTA
gaaagcaaattattcaaaga

SEQ ID NO: 83836 - DNA, 20 bp, Artificial Sequence
  Description of Artificial Sequence: Synthetic oligonucleotide
  Target: SCNA; (+) strand; PAM type: YTN; PAM sequence: TTA
ttcaaagaagttatctctta

SEQ ID NO: 83837 - DNA, 20 bp, Artificial Sequence
  Description of Artificial Sequence: Synthetic oligonucleotide
  Target: SCNA; (+) strand; PAM type: YTN; PAM sequence: TTC
aaagaagttatctcttaatg

SEQ ID NO: 83838 - DNA, 20 bp, Artificial Sequence
  Description of Artificial Sequence: Synthetic oligonucleotide
  Target: SCNA; (+) strand; PAM type: YTN; PAM sequence: TTA
tctcttaatggctatttgat

SEQ ID NO: 83839 - DNA, 20 bp, Artificial Sequence
  Description of Artificial Sequence: Synthetic oligonucleotide
  Target: SCNA; (+) strand; PAM type: YTN; PAM sequence: CTC
ttaatggctatttgataaac

SEQ ID NO: 83840 - DNA, 20 bp, Artificial Sequence
  Description of Artificial Sequence: Synthetic oligonucleotide
  Target: SCNA; (+) strand; PAM type: YTN; PAM sequence: CTT
aatggctatttgataaacac

SEQ ID NO: 83841 - DNA, 20 bp, Artificial Sequence
  Description of Artificial Sequence: Synthetic oligonucleotide
  Target: SCNA; (+) strand; PAM type: YTN; PAM sequence: TTA
atggctatttgataaacact

SEQ ID NO: 83842 - DNA, 20 bp, Artificial Sequence
  Description of Artificial Sequence: Synthetic oligonucleotide
  Target: SCNA; (+) strand; PAM type: YTN; PAM sequence: CTA
tttgataaacactttagtat

SEQ ID NO: 83843 - DNA, 20 bp, Artificial Sequence
  Description of Artificial Sequence: Synthetic oligonucleotide
  Target: SCNA; (+) strand; PAM type: YTN; PAM sequence: TTT
gataaacactttagtataaa

SEQ ID NO: 83844 - DNA, 20 bp, Artificial Sequence
  Description of Artificial Sequence: Synthetic oligonucleotide
  Target: SCNA; (+) strand; PAM type: YTN; PAM sequence: TTG
ataaacactttagtataaaa

SEQ ID NO: 83845 - DNA, 20 bp, Artificial Sequence
  Description of Artificial Sequence: Synthetic oligonucleotide
  Target: SCNA; (+) strand; PAM type: YTN; PAM sequence: CTT
tagtataaaaacatatccat

SEQ ID NO: 83846 - DNA, 20 bp, Artificial Sequence
  Description of Artificial Sequence: Synthetic oligonucleotide
  Target: SCNA; (+) strand; PAM type: YTN; PAM sequence: TTT
agtataaaaacatatccatg

SEQ ID NO: 83847 - DNA, 20 bp, Artificial Sequence
  Description of Artificial Sequence: Synthetic oligonucleotide
  Target: SCNA; (+) strand; PAM type: YTN; PAM sequence: TTA
gtataaaaacatatccatgt

SEQ ID NO: 83848 - DNA, 20 bp, Artificial Sequence
  Description of Artificial Sequence: Synthetic oligonucleotide
  Target: SCNA; (+) strand; PAM type: YTN; PAM sequence: TTT
gtaacatcatcttggctata

SEQ ID NO: 83849 - DNA, 20 bp, Artificial Sequence
  Description of Artificial Sequence: Synthetic oligonucleotide
  Target: SCNA; (+) strand; PAM type: YTN; PAM sequence: TTG
taacatcatcttggctataa

SEQ ID NO: 83850 - DNA, 20 bp, Artificial Sequence
  Description of Artificial Sequence: Synthetic oligonucleotide
  Target: SCNA; (+) strand; PAM type: YTN; PAM sequence: CTT
ggctataaaacgttatactg

SEQ ID NO: 83851 - DNA, 20 bp, Artificial Sequence
  Description of Artificial Sequence: Synthetic oligonucleotide
  Target: SCNA; (+) strand; PAM type: YTN; PAM sequence: TTG
gctataaaacgttatactgt

SEQ ID NO: 83852 - DNA, 20 bp, Artificial Sequence
  Description of Artificial Sequence: Synthetic oligonucleotide
  Target: SCNA; (+) strand; PAM type: YTN; PAM sequence: CTA
taaaacgttatactgtatca

SEQ ID NO: 83853 - DNA, 20 bp, Artificial Sequence
  Description of Artificial Sequence: Synthetic oligonucleotide
  Target: SCNA; (+) strand; PAM type: YTN; PAM sequence: TTA
tactgtatcatatatttatt

SEQ ID NO: 83854 - DNA, 20 bp, Artificial Sequence
  Description of Artificial Sequence: Synthetic oligonucleotide
  Target: SCNA; (+) strand; PAM type: YTN; PAM sequence: CTG
tatcatatatttatttaatt

SEQ ID NO: 83855 - DNA, 20 bp, Artificial Sequence
  Description of Artificial Sequence: Synthetic oligonucleotide
  Target: SCNA; (+) strand; PAM type: YTN; PAM sequence: TTT
atttaattatctatttttaa

SEQ ID NO: 83856 - DNA, 20 bp, Artificial Sequence
  Description of Artificial Sequence: Synthetic oligonucleotide
  Target: SCNA; (+) strand; PAM type: YTN; PAM sequence: TTA
tttaattatctatttttaat

SEQ ID NO: 83857 - DNA, 20 bp, Artificial Sequence
  Description of Artificial Sequence: Synthetic oligonucleotide
  Target: SCNA; (+) strand; PAM type: YTN; PAM sequence: TTT
aattatctatttttaattta

SEQ ID NO: 83858 - DNA, 20 bp, Artificial Sequence
  Description of Artificial Sequence: Synthetic oligonucleotide
  Target: SCNA; (+) strand; PAM type: YTN; PAM sequence: TTA
attatctatttttaatttac

SEQ ID NO: 83859 - DNA, 20 bp, Artificial Sequence
  Description of Artificial Sequence: Synthetic oligonucleotide
  Target: SCNA; (+) strand; PAM type: YTN; PAM sequence: TTA
tctatttttaatttactgtt

SEQ ID NO: 83860 - DNA, 20 bp, Artificial Sequence
  Description of Artificial Sequence: Synthetic oligonucleotide
  Target: SCNA; (+) strand; PAM type: YTN; PAM sequence: CTA
tttttaatttactgttactt

SEQ ID NO: 83861 - DNA, 20 bp, Artificial Sequence
  Description of Artificial Sequence: Synthetic oligonucleotide
  Target: SCNA; (+) strand; PAM type: YTN; PAM sequence: TTT
ttaatttactgttacttttt

SEQ ID NO: 83862 - DNA, 20 bp, Artificial Sequence
  Description of Artificial Sequence: Synthetic oligonucleotide
  Target: SCNA; (+) strand; PAM type: YTN; PAM sequence: TTT
taatttactgttacttttta

SEQ ID NO: 83863 - DNA, 20 bp, Artificial Sequence
  Description of Artificial Sequence: Synthetic oligonucleotide
  Target: SCNA; (+) strand; PAM type: YTN; PAM sequence: TTT
aatttactgttactttttat

SEQ ID NO: 83864 - DNA, 20 bp, Artificial Sequence
  Description of Artificial Sequence: Synthetic oligonucleotide
  Target: SCNA; (+) strand; PAM type: YTN; PAM sequence: TTA
atttactgttactttttatt

SEQ ID NO: 83865 - DNA, 20 bp, Artificial Sequence
  Description of Artificial Sequence: Synthetic oligonucleotide
  Target: SCNA; (+) strand; PAM type: YTN; PAM sequence: TTT
actgttactttttattttcg

SEQ ID NO: 83866 - DNA, 20 bp, Artificial Sequence
  Description of Artificial Sequence: Synthetic oligonucleotide
  Target: SCNA; (+) strand; PAM type: YTN; PAM sequence: TTA
ctgttactttttattttcgt

SEQ ID NO: 83867 - DNA, 20 bp, Artificial Sequence
  Description of Artificial Sequence: Synthetic oligonucleotide
  Target: SCNA; (+) strand; PAM type: YTN; PAM sequence: CTG
ttactttttattttcgtata

SEQ ID NO: 83868 - DNA, 20 bp, Artificial Sequence
  Description of Artificial Sequence: Synthetic oligonucleotide
  Target: SCNA; (+) strand; PAM type: YTN; PAM sequence: TTA
ctttttattttcgtatacat

SEQ ID NO: 83869 - DNA, 20 bp, Artificial Sequence
  Description of Artificial Sequence: Synthetic oligonucleotide
  Target: SCNA; (+) strand; PAM type: YTN; PAM sequence: CTT
tttattttcgtatacatcgg

SEQ ID NO: 83870 - DNA, 20 bp, Artificial Sequence
  Description of Artificial Sequence: Synthetic oligonucleotide
  Target: SCNA; (+) strand; PAM type: YTN; PAM sequence: TTT
ttattttcgtatacatcggt

SEQ ID NO: 83871 - DNA, 20 bp, Artificial Sequence
  Description of Artificial Sequence: Synthetic oligonucleotide
  Target: SCNA; (+) strand; PAM type: YTN; PAM sequence: TTT
tattttcgtatacatcggtt

SEQ ID NO: 83872 - DNA, 20 bp, Artificial Sequence
  Description of Artificial Sequence: Synthetic oligonucleotide
  Target: SCNA; (+) strand; PAM type: YTN; PAM sequence: TTT
attttcgtatacatcggttg

SEQ ID NO: 83873 - DNA, 20 bp, Artificial Sequence
  Description of Artificial Sequence: Synthetic oligonucleotide
  Target: SCNA; (+) strand; PAM type: YTN; PAM sequence: TTA
ttttcgtatacatcggttga

SEQ ID NO: 83874 - DNA, 20 bp, Artificial Sequence
  Description of Artificial Sequence: Synthetic oligonucleotide
  Target: SCNA; (+) strand; PAM type: YTN; PAM sequence: TTT
tcgtatacatcggttgaatt

SEQ ID NO: 83875 - DNA, 20 bp, Artificial Sequence
  Description of Artificial Sequence: Synthetic oligonucleotide
  Target: SCNA; (+) strand; PAM type: YTN; PAM sequence: TTT
cgtatacatcggttgaattc

SEQ ID NO: 83876 - DNA, 20 bp, Artificial Sequence
  Description of Artificial Sequence: Synthetic oligonucleotide
  Target: SCNA; (+) strand; PAM type: YTN; PAM sequence: TTC
gtatacatcggttgaattca

SEQ ID NO: 83877 - DNA, 20 bp, Artificial Sequence
  Description of Artificial Sequence: Synthetic oligonucleotide
  Target: SCNA; (+) strand; PAM type: YTN; PAM sequence: TTG
aattcaatttttcttctttt

SEQ ID NO: 83878 - DNA, 20 bp, Artificial Sequence
  Description of Artificial Sequence: Synthetic oligonucleotide
  Target: SCNA; (+) strand; PAM type: YTN; PAM sequence: TTC
aatttttcttctttttgtct

SEQ ID NO: 83879 - DNA, 20 bp, Artificial Sequence
  Description of Artificial Sequence: Synthetic oligonucleotide
  Target: SCNA; (+) strand; PAM type: YTN; PAM sequence: TTT
ttcttctttttgtcttccaa

SEQ ID NO: 83880 - DNA, 20 bp, Artificial Sequence
  Description of Artificial Sequence: Synthetic oligonucleotide
  Target: SCNA; (+) strand; PAM type: YTN; PAM sequence: TTT
tcttctttttgtcttccaag

SEQ ID NO: 83881 - DNA, 20 bp, Artificial Sequence
  Description of Artificial Sequence: Synthetic oligonucleotide
  Target: SCNA; (+) strand; PAM type: YTN; PAM sequence: TTT
cttctttttgtcttccaaga

SEQ ID NO: 83882 - DNA, 20 bp, Artificial Sequence
  Description of Artificial Sequence: Synthetic oligonucleotide
  Target: SCNA; (+) strand; PAM type: YTN; PAM sequence: TTC
ttctttttgtcttccaagaa

SEQ ID NO: 83883 - DNA, 20 bp, Artificial Sequence
  Description of Artificial Sequence: Synthetic oligonucleotide
  Target: SCNA; (+) strand; PAM type: YTN; PAM sequence: CTT
ctttttgtcttccaagaata

SEQ ID NO: 83884 - DNA, 20 bp, Artificial Sequence
  Description of Artificial Sequence: Synthetic oligonucleotide
  Target: SCNA; (+) strand; PAM type: YTN; PAM sequence: TTC
tttttgtcttccaagaataa

SEQ ID NO: 83885 - DNA, 20 bp, Artificial Sequence
  Description of Artificial Sequence: Synthetic oligonucleotide
  Target: SCNA; (+) strand; PAM type: YTN; PAM sequence: CTT
tttgtcttccaagaataaaa

SEQ ID NO: 83886 - DNA, 20 bp, Artificial Sequence
  Description of Artificial Sequence: Synthetic oligonucleotide
  Target: SCNA; (+) strand; PAM type: YTN; PAM sequence: TTT
ttgtcttccaagaataaaac

SEQ ID NO: 83887 - DNA, 20 bp, Artificial Sequence
  Description of Artificial Sequence: Synthetic oligonucleotide
  Target: SCNA; (+) strand; PAM type: YTN; PAM sequence: TTT
tgtcttccaagaataaaacg

SEQ ID NO: 83888 - DNA, 20 bp, Artificial Sequence
  Description of Artificial Sequence: Synthetic oligonucleotide
  Target: SCNA; (+) strand; PAM type: YTN; PAM sequence: TTT
gtcttccaagaataaaacgc

SEQ ID NO: 83889 - DNA, 20 bp, Artificial Sequence
  Description of Artificial Sequence: Synthetic oligonucleotide
  Target: SCNA; (+) strand; PAM type: YTN; PAM sequence: TTG
tcttccaagaataaaacgct

SEQ ID NO: 83890 - DNA, 20 bp, Artificial Sequence
  Description of Artificial Sequence: Synthetic oligonucleotide
  Target: SCNA; (+) strand; PAM type: YTN; PAM sequence: CTT
ccaagaataaaacgcttgtc

SEQ ID NO: 83891 - DNA, 20 bp, Artificial Sequence
  Description of Artificial Sequence: Synthetic oligonucleotide
  Target: SCNA; (+) strand; PAM type: YTN; PAM sequence: TTC
caagaataaaacgcttgtct

SEQ ID NO: 83892 - DNA, 20 bp, Artificial Sequence
  Description of Artificial Sequence: Synthetic oligonucleotide
  Target: SCNA; (+) strand; PAM type: YTN; PAM sequence: CTT
gtctatatacccagtctaat

SEQ ID NO: 83893 - DNA, 20 bp, Artificial Sequence
  Description of Artificial Sequence: Synthetic oligonucleotide
  Target: SCNA; (+) strand; PAM type: YTN; PAM sequence: TTG
tctatatacccagtctaata

SEQ ID NO: 83894 - DNA, 20 bp, Artificial Sequence
  Description of Artificial Sequence: Synthetic oligonucleotide
  Target: SCNA; (+) strand; PAM type: YTN; PAM sequence: CTA
tatacccagtctaataattc

SEQ ID NO: 83895 - DNA, 20 bp, Artificial Sequence
  Description of Artificial Sequence: Synthetic oligonucleotide
  Target: SCNA; (+) strand; PAM type: YTN; PAM sequence: CTA
ataattctttatatatgtta

SEQ ID NO: 83896 - DNA, 20 bp, Artificial Sequence
  Description of Artificial Sequence: Synthetic oligonucleotide
  Target: SCNA; (+) strand; PAM type: YTN; PAM sequence: TTC
tttatatatgttaaatatta

SEQ ID NO: 83897 - DNA, 20 bp, Artificial Sequence
  Description of Artificial Sequence: Synthetic oligonucleotide
  Target: SCNA; (+) strand; PAM type: YTN; PAM sequence: CTT
tatatatgttaaatattact

SEQ ID NO: 83898 - DNA, 20 bp, Artificial Sequence
  Description of Artificial Sequence: Synthetic oligonucleotide
  Target: SCNA; (+) strand; PAM type: YTN; PAM sequence: TTT
atatatgttaaatattacta

SEQ ID NO: 83899 - DNA, 20 bp, Artificial Sequence
  Description of Artificial Sequence: Synthetic oligonucleotide
  Target: SCNA; (+) strand; PAM type: YTN; PAM sequence: TTA
tatatgttaaatattactaa

SEQ ID NO: 83900 - DNA, 20 bp, Artificial Sequence
  Description of Artificial Sequence: Synthetic oligonucleotide
  Target: SCNA; (+) strand; PAM type: YTN; PAM sequence: TTA
aatattactaataagttaat

SEQ ID NO: 83901 - DNA, 20 bp, Artificial Sequence
  Description of Artificial Sequence: Synthetic oligonucleotide
  Target: SCNA; (+) strand; PAM type: YTN; PAM sequence: TTA
ctaataagttaatcttaaat

SEQ ID NO: 83902 - DNA, 20 bp, Artificial Sequence
  Description of Artificial Sequence: Synthetic oligonucleotide
  Target: SCNA; (+) strand; PAM type: YTN; PAM sequence: CTA
ataagttaatcttaaatcaa

SEQ ID NO: 83903 - DNA, 20 bp, Artificial Sequence
  Description of Artificial Sequence: Synthetic oligonucleotide
  Target: SCNA; (+) strand; PAM type: YTN; PAM sequence: TTA
atcttaaatcaacttctcta

SEQ ID NO: 83904 - DNA, 20 bp, Artificial Sequence
  Description of Artificial Sequence: Synthetic oligonucleotide
  Target: SCNA; (+) strand; PAM type: YTN; PAM sequence: CTT
aaatcaacttctctataata

SEQ ID NO: 83905 - DNA, 20 bp, Artificial Sequence
  Description of Artificial Sequence: Synthetic oligonucleotide
  Target: SCNA; (+) strand; PAM type: YTN; PAM sequence: TTA
aatcaacttctctataatag

SEQ ID NO: 83906 - DNA, 20 bp, Artificial Sequence
  Description of Artificial Sequence: Synthetic oligonucleotide
  Target: SCNA; (+) strand; PAM type: YTN; PAM sequence: CTT
ctctataatagacaatgatc

SEQ ID NO: 83907 - DNA, 20 bp, Artificial Sequence
  Description of Artificial Sequence: Synthetic oligonucleotide
  Target: SCNA; (+) strand; PAM type: YTN; PAM sequence: TTC
tctataatagacaatgatcc

SEQ ID NO: 83908 - DNA, 20 bp, Artificial Sequence
  Description of Artificial Sequence: Synthetic oligonucleotide
  Target: SCNA; (+) strand; PAM type: YTN; PAM sequence: CTC
tataatagacaatgatcctt

SEQ ID NO: 83909 - DNA, 20 bp, Artificial Sequence
  Description of Artificial Sequence: Synthetic oligonucleotide
  Target: SCNA; (+) strand; PAM type: YTN; PAM sequence: CTA
taatagacaatgatccttca

SEQ ID NO: 83910 - DNA, 20 bp, Artificial Sequence
  Description of Artificial Sequence: Synthetic oligonucleotide
  Target: SCNA; (+) strand; PAM type: YTN; PAM sequence: CTT
cactaagtcttactgattct

SEQ ID NO: 83911 - DNA, 20 bp, Artificial Sequence
  Description of Artificial Sequence: Synthetic oligonucleotide
  Target: SCNA; (+) strand; PAM type: YTN; PAM sequence: TTC
actaagtcttactgattctt

SEQ ID NO: 83912 - DNA, 20 bp, Artificial Sequence
  Description of Artificial Sequence: Synthetic oligonucleotide
  Target: SCNA; (+) strand; PAM type: YTN; PAM sequence: CTA
agtcttactgattcttttct

SEQ ID NO: 83913 - DNA, 20 bp, Artificial Sequence
  Description of Artificial Sequence: Synthetic oligonucleotide
  Target: SCNA; (+) strand; PAM type: YTN; PAM sequence: CTT
actgattcttttctgagtcc

SEQ ID NO: 83914 - DNA, 20 bp, Artificial Sequence
  Description of Artificial Sequence: Synthetic oligonucleotide
  Target: SCNA; (+) strand; PAM type: YTN; PAM sequence: TTA
ctgattcttttctgagtcca

SEQ ID NO: 83915 - DNA, 20 bp, Artificial Sequence
  Description of Artificial Sequence: Synthetic oligonucleotide
  Target: SCNA; (+) strand; PAM type: YTN; PAM sequence: CTG
attcttttctgagtccattt

SEQ ID NO: 83916 - DNA, 20 bp, Artificial Sequence
  Description of Artificial Sequence: Synthetic oligonucleotide
  Target: SCNA; (+) strand; PAM type: YTN; PAM sequence: TTC
ttttctgagtccatttctat

SEQ ID NO: 83917 - DNA, 20 bp, Artificial Sequence
  Description of Artificial Sequence: Synthetic oligonucleotide
  Target: SCNA; (+) strand; PAM type: YTN; PAM sequence: CTT
ttctgagtccatttctattt

SEQ ID NO: 83918 - DNA, 20 bp, Artificial Sequence
  Description of Artificial Sequence: Synthetic oligonucleotide
  Target: SCNA; (+) strand; PAM type: YTN; PAM sequence: TTT
tctgagtccatttctattta

SEQ ID NO: 83919 - DNA, 20 bp, Artificial Sequence
  Description of Artificial Sequence: Synthetic oligonucleotide
  Target: SCNA; (+) strand; PAM type: YTN; PAM sequence: TTT
ctgagtccatttctatttaa

SEQ ID NO: 83920 - DNA, 20 bp, Artificial Sequence
  Description of Artificial Sequence: Synthetic oligonucleotide
  Target: SCNA; (+) strand; PAM type: YTN; PAM sequence: TTC
tgagtccatttctatttaaa

SEQ ID NO: 83921 - DNA, 20 bp, Artificial Sequence
  Description of Artificial Sequence: Synthetic oligonucleotide
  Target: SCNA; (+) strand; PAM type: YTN; PAM sequence: CTG
agtccatttctatttaaatt

SEQ ID NO: 83922 - DNA, 20 bp, Artificial Sequence
  Description of Artificial Sequence: Synthetic oligonucleotide
  Target: SCNA; (+) strand; PAM type: YTN; PAM sequence: TTT
ctatttaaattatccttaaa

SEQ ID NO: 83923 - DNA, 20 bp, Artificial Sequence
  Description of Artificial Sequence: Synthetic oligonucleotide
  Target: SCNA; (+) strand; PAM type: YTN; PAM sequence: TTC
tatttaaattatccttaaat

SEQ ID NO: 83924 - DNA, 20 bp, Artificial Sequence
  Description of Artificial Sequence: Synthetic oligonucleotide
  Target: SCNA; (+) strand; PAM type: YTN; PAM sequence: CTA
tttaaattatccttaaattt

SEQ ID NO: 83925 - DNA, 20 bp, Artificial Sequence
  Description of Artificial Sequence: Synthetic oligonucleotide
  Target: SCNA; (+) strand; PAM type: YTN; PAM sequence: TTT
aaattatccttaaatttcgt

SEQ ID NO: 83926 - DNA, 20 bp, Artificial Sequence
  Description of Artificial Sequence: Synthetic oligonucleotide
  Target: SCNA; (+) strand; PAM type: YTN; PAM sequence: TTA
aattatccttaaatttcgtc

SEQ ID NO: 83927 - DNA, 20 bp, Artificial Sequence
  Description of Artificial Sequence: Synthetic oligonucleotide
  Target: SCNA; (+) strand; PAM type: YTN; PAM sequence: TTA
tccttaaatttcgtcattaa

SEQ ID NO: 83928 - DNA, 20 bp, Artificial Sequence
  Description of Artificial Sequence: Synthetic oligonucleotide
  Target: SCNA; (+) strand; PAM type: YTN; PAM sequence: CTT
aaatttcgtcattaaaatat

SEQ ID NO: 83929 - DNA, 20 bp, Artificial Sequence
  Description of Artificial Sequence: Synthetic oligonucleotide
  Target: SCNA; (+) strand; PAM type: YTN; PAM sequence: TTA
aatttcgtcattaaaatatt

SEQ ID NO: 83930 - DNA, 20 bp, Artificial Sequence
  Description of Artificial Sequence: Synthetic oligonucleotide
  Target: SCNA; (+) strand; PAM type: YTN; PAM sequence: TTT
cgtcattaaaatattgaagt

SEQ ID NO: 83931 - DNA, 20 bp, Artificial Sequence
  Description of Artificial Sequence: Synthetic oligonucleotide
  Target: SCNA; (+) strand; PAM type: YTN; PAM sequence: TTC
gtcattaaaatattgaagtt

SEQ ID NO: 83932 - DNA, 20 bp, Artificial Sequence
  Description of Artificial Sequence: Synthetic oligonucleotide
  Target: SCNA; (+) strand; PAM type: YTN; PAM sequence: TTA
aaatattgaagttaaagttg

SEQ ID NO: 83933 - DNA, 20 bp, Artificial Sequence
  Description of Artificial Sequence: Synthetic oligonucleotide
  Target: SCNA; (+) strand; PAM type: YTN; PAM sequence: TTG
aagttaaagttgtatgtgca

SEQ ID NO: 83934 - DNA, 20 bp, Artificial Sequence
  Description of Artificial Sequence: Synthetic oligonucleotide
  Target: SCNA; (+) strand; PAM type: YTN; PAM sequence: TTA
aagttgtatgtgcagggttg

SEQ ID NO: 83935 - DNA, 20 bp, Artificial Sequence
  Description of Artificial Sequence: Synthetic oligonucleotide
  Target: SCNA; (+) strand; PAM type: YTN; PAM sequence: TTG
tatgtgcagggttgcttttt

SEQ ID NO: 83936-83965 - skipped (30 entries)

SEQ ID NO: 83966 - DNA, 23 bp, Artificial Sequence
  Description of Artificial Sequence: Synthetic oligonucleotide
  modified_base (1)..(21): a, c, t, g, unknown or other
nnnnnnnnnnnnnnnnnnnnnrg

SEQ ID NO: 83967 - RNA, 100 nt, Artificial Sequence
  chemically synthesized
  misc_feature (1)..(20): n is a, c, g, u, or other
nnnnnnnnnnnnnnnnnnnnguuuuagagcuagaaauagcaaguuaaaauaaggcuaguccguuaucaacuugaaaaaguggcaccgagucggugcuuuu

SEQ ID NO: 83968 - RNA, 96 nt, Artificial Sequence
  chemically synthesized
  misc_feature (1)..(20): n is a, c, g, u, or other
nnnnnnnnnnnnnnnnnnnnguuuuagagcuagaaauagcaaguuaaaauaaggcuaguccguuaucaacuugaaaaaguggcaccgagucggugc

SEQ ID NO: 83969 - RNA, 114 nt, Artificial Sequence
  chemically synthesized
  misc_feature (1)..(30): n is a, c, g, u, or other and this region may encompass 17-30 nucleotides;
  misc_feature (107)..(114): This region may encompass 1-8 urasil;
nnnnnnnnnnnnnnnnnnnnnnnnnnnnnnguuuuagagcuagaaauagcaaguuaaaauaaggcuaguccguuaucaacuugaaaaaguggcaccgagucggugcuuuuuuuu

SEQ ID NO: 83970 - protein, 9 aa, Unknown
  Description of Unknown: Homing endonuclease sequence
LAGLIDADG

SEQ ID NO: 83971 - DNA, 20 bp, Artificial Sequence
  Chemically Synthesized
tcattatgccactatagggt

SEQ ID NO: 83972 - DNA, 20 bp, Artificial Sequence
  Chemically Synthesized
ctcattatgccactataggg

SEQ ID NO: 83973 - DNA, 20 bp, Artificial Sequence
  Chemically Synthesized
ctcttctgcccaccctatag

SEQ ID NO: 83974 - DNA, 20 bp, Artificial Sequence
  Chemically Synthesized
cacctcattatgccactata

SEQ ID NO: 83975 - DNA, 20 bp, Artificial Sequence
  Chemically Synthesized
caccctatagtggcataatg

SEQ ID NO: 83976 - DNA, 20 bp, Artificial Sequence
  Chemically Synthesized
gagctgtggtaacataagtg

SEQ ID NO: 83977 - DNA, 20 bp, Artificial Sequence
  Chemically Synthesized
tcctgtcttacatgcactgc

SEQ ID NO: 83978 - DNA, 20 bp, Artificial Sequence
  Chemically Synthesized
caattcctttcaaggcagcg

SEQ ID NO: 83979 - DNA, 20 bp, Artificial Sequence
  Chemically Synthesized
gcgtggcatgctatcacaga

SEQ ID NO: 83980 - DNA, 20 bp, Artificial Sequence
  Chemically Synthesized
agcgtggcatgctatcacag
